(19) United States
(12) Patent Application Publication
(10) Pub. No.: US 2026/0125655 A1
(43) Pub. Date: May 7, 2026

(54) METHOD FOR PRODUCING LOW-ANTIGENIC CELL

(71) Applicant: Kyoto University, Kyoto (JP)

(72) Inventors: Akitsu Hotta, Kyoto (JP); Huaigeng Xu, Kyoto (JP); Shin Kaneko, Kyoto (JP); Bo Wang, Kyoto (JP)

(21) Appl. No.: 19/336,008

(22) Filed: Sep. 22, 2025

Related U.S. Application Data
(63) Continuation of application No. 16/969,222, now abandoned.

(30) Foreign Application Priority Data
Feb. 16, 2018 (JP) 2018-026421

(51) Int. Cl. C12N 5/074; A61K 39/00; C12N 15/11; C12Q 1/6881

(52) U.S. Cl. CPC C12N 5/0696; A61K 39/001; C12N 15/11; C12Q 1/6881; A61K 2039/515; C12N 2310/20; C12N 2501/24; C12N 2501/25

(57) ABSTRACT

A method for producing, from a donor cell, a low-antigenic cell in which a rejection reaction is reduced in a case where the cell is allogeneically transplanted into a recipient, the method including: determining human leukocyte antigen (HLA) alleles for the donor cell and the recipient, respectively; specifying an HLA allele that is present in the donor cell but is not present in the recipient; and disrupting or modifying the specified HLA allele to obtain a cell population including a cell not expressing an HLA protein specific to the donor cell, in which the cell not expressing the HLA protein specific to the donor cell is the low-antigenic cell.

### CROSS REFERENCE TO RELATED APPLICATIONS

[0001] This application is a continuation of U.S. patent application Ser. No. 16/969,222, filed Aug. 12, 2020, which is a U.S. National Stage of International Application No. PCT/JP2019/005524, filed Feb. 15, 2019, which claims the benefit of Japanese Patent Application No. 2018-026421, filed Feb. 16, 2018, the entire contents of each which are fully incorporated herein by reference.

### INCORPORATION BY REFERENCE OF MATERIAL SUBMITTED ELECTRONICALLY

[0002] The present application is being filed along with a sequence listing in electronic format. The sequence listing is provided as a file entitled “70815A_SeqListing.xml, created Sep. 18, 2025, which is 7,074,572 bytes in size. The information in the electronic format of the sequence listing is incorporated by reference in its entirety.

### TECHNICAL FIELD

[0003] The present invention relates to a method for producing a low-antigenic cell. More specifically, the present invention relates to a method for producing a low-antigenic cell, a kit for detecting a low-antigenic cell, a cell, a gRNA, and a method for specifying a target base sequence. Priority is claimed on Japanese Patent Application No. 2018-026421, filed Feb. 16, 2018, the content of which is incorporated herein by reference.

### BACKGROUND ART

[0004] In a case of allogeneic transplantation in which donor cells are transplanted into a recipient (patient) who is the other person, transplanted cells are rejected due to an immune reaction.

[0005] A protein that plays the most important role in distinguishing between self cells and non-self cells is a cell surface protein called a human leukocyte antigen (HLA) or a major histocompatibility complex (MHC).

[0006] HLA is classified into class I and class II. Class I HLA proteins are expressed in most cell types in a body. The class I HLA protein has a function of forming a heterodimer with β2-Microglobulin (B2M) to be expressed on a cell surface, and presenting a peptide with respect to CD8-positive cytotoxic T cells to induce activation. The antigenic peptides presented are endogenous and have a length of 8 to 10 amino acids in many cases.

[0007] Genes classified into class I HLA are mainly six genes of an HLA-A gene, an HLA-B gene, an HLA-C gene, an HLA-E gene, an HLA-F gene, and an HLA-G gene. In addition, many pseudogenes (HLA-H, HLA-J, HLA-K, HLA-L, HLA-P, HLA-T, HLA-U, HLA-V, HLA-W, HLA-X, HLA-Y, and the like) are also known. Among the genes, three genes of the HLA-A gene, HLA-B gene, and HLA-C gene have particularly great sequence diversity among individuals and play a major role in identifying self cells and non-self cells in transplantation immunity.

[0008] Class II HLA proteins are mainly expressed in immune cells such as macrophages, dendritic cells, activated T cells and B cells, and the like. The class II HLA protein has a function of forming a heterodimer with an α chain and a β chain and presenting a peptide with respect to CD4 helper T cells to induce activation. The antigenic peptides presented are exogenous and have a length of 15 to 24 amino acids in many cases.

[0009] Genes classified into class II HLA are HLA-DR (α chain: HLA-DRA, β chain: HLA-DRB), HLA-DQ (α chain: HLA-DQA1, β chain: HLA-DQB1), HLA-DP (α chain: HLA-DPA1 or HLA-DPA2, β chain: HLA-DPB1 or HLA-DPB2). In addition, many pseudogenes (HLA-DMA, HLA-DMB, HLA-DOA, HLA-DOB) are also known to exist.

[0010] HLA genes have sequence diversity and thus are involved in recognition of self and non-self cells at the cellular level. HLA matching is also particularly important for reducing immune rejection during allogeneic transplantation. For example, in transplantation of hematopoietic stem cells, it is recommended to find and transplant donors in which antigenicities in both alleles of HLA-A, HLA-B, HLA-C, and HLA-DR, that is, alleles at a total of 8 loci, are as consistent as possible.

[0011] In addition, in consideration of results of engraftment rates of kidney transplantation and the like, it has been reported that, as the degree of consistency of HLA antigenicity becomes high, engraftment efficiency becomes significantly high.

[0012] There is also an immune system induced by the absence of HLA antigens on a cell surface. NK cells express multiple inhibitory receptors. For example, it is known that a complex receptor of CD94 and NKG2A, which recognizes HLA-E and inhibits the action of NK cells, induces activation of NK cells when a cell without HLA-E is found, and attacks the cells. In addition, there is also a receptor family called Killer cell Immunoglobulin-like Receptor (KIR), which is classified into 2D and 3D according to the number of extracellular domains, and is also divided into L (long) and S (short) depending on lengths of intracellular domain. It is known that a 2DL1 receptor recognizes HLA-C2, 2DL2 and 2DL3 receptors recognize HLA-C1, a 2DL4 receptor recognizes HLA-G, a 3DL1 recognizes HLA-Bw4, and a 3DL2 recognizes HLA-A3 or HLA-A11 to inhibit activity of NK cells. There are polymorphisms in KIR, and for example, almost all Japanese (98% or more) have 2DL1, 2DL3, or 3DL4, but it has been reported that a proportion of persons having 2DL2 is about 15%, which is rare.

[0013] In addition, because pluripotent stem cells such as iPS cells and ES cells have pluripotency capable of differentiating into various cell types, cell therapy and regenerative medicine in which pluripotent stem cells are differentiated into various cells and then transplanted to patients are attracting attention.

[0014] There have been reported cases in which ES cells are differentiated into nerve cells and transplanted into a bone marrow injury patient, and cases in which iPS cells are differentiated into retinal pigment epithelial cells and transplanted into an age-related macular degeneration patient. It has been reported that, in a case of transplanting such pluripotent stem cell-derived cells, it is important to match transplanted cells with an HLA type of a patient.

[0015] However, pluripotent stem cells require a great deal of costs and time for establishment, and thus there is a problem in that it is difficult to prepare cells with matching HLA types for each patient. As one means for solving this problem, for example, Patent Literature 1 discloses cells deficient in a B2M gene required for displaying class I HLA proteins on a cell surface.

[0016] In recent years, by genome editing technology that uses CRISPR-Cas9 and guide RNA (gRNA), it became possible to insert an arbitrary DNA fragment by inducing double-stranded DNA breaks (Double strand break, DSB) in genomic DNA depending on target base sequences of gRNA to delete part of genomic DNA, and by co-introducing Cas9 and gRNA with a template DNA having a partially homologous sequence near the double-stranded DNA cleavage induction site.

[0017] However, DSB induction in the genome editing technique is determined by a spacer base sequence of about 20 bases of gRNA that recognizes and binds to a target sequence and by a base sequence called a PAM sequence of about 3 to 5 bases. Accordingly, unless a base sequence of gRNA matches a base sequence of a target site, efficient DSB induction is difficult.

[0018] In addition, a risk is known, in which, in a case where a base sequence that is very similar to a base sequence of a target site, for example, a base sequence that differs by only one base, is present outside the target site, it will induce a DSB to sites other than the target site due to errors, resulting in induction of undesired genomic sequence mutations.

### CITATION LIST

### Patent Literature

### [Patent Literature 1]

[0019] PCT International Publication No. WO2012/145384

### SUMMARY OF INVENTION

### Technical Problem

[0020] Because the cells disclosed in Patent Literature 1 are deficient in a B2M gene, class I HLA proteins are not displayed on the cell surface. Accordingly, it is considered that an immune reaction in the case where the cells are allogeneically transplanted is inhibited. However, in a case where an HLA protein is not displayed on the cell surface, an antigen-presenting ability of the cell is lost. In a case where the cell loses its antigen-presenting ability, a B2M-deficient cell cannot present virus- or tumor-derived antigens when they are infected with viruses or the like or when they become tumors, and as a result, there is a risk in which it may help growth of viruses and tumors. In addition, a cell in which an HLA protein is not presented on the cell surface is attacked by NK cells that recognize “missing self.”

[0021] Accordingly, it is possible to selectively disrupt only an arbitrary HLA gene by using the genome editing technique. However, there are multiple HLA genes, and there is a high degree of sequence homology between HLA genes, including many pseudogenes. In addition, because sequence diversity among individuals is large even with the same HLA genes, even when a target base sequence that matches a certain HLA gene sequence is identified, it cannot always be used in cells derived from other donors. For this reason, it is not easy to determine an appropriate target sequence for genome editing. Furthermore, in the genome editing technique of the related art, it takes a great deal of time to search for a cell in which a desired genome has been edited.

[0022] An object of the present invention is to provide a technique for producing a low-antigenic cell in which a rejection reaction is reduced in a case where the cell is allogeneically transplanted into a recipient.

### Solution to Problem

[0023] The present invention includes the following aspects.

[0024] [1] A method for producing, from a donor cell, a low-antigenic cell in which a rejection reaction is reduced in a case where the cell is allogeneically transplanted into a recipient, the method including: determining human leukocyte antigen (HLA) alleles for the donor cell and the recipient, respectively; specifying an HLA allele that is present in the donor cell but is not present in the recipient; and disrupting or modifying the specified HLA allele to obtain a cell population including a cell not expressing an HLA protein specific to the donor cell, in which the cell not expressing the HLA protein specific to the donor cell is the low-antigenic cell.

[0025] [2] The production method according to [1], in which the HLA allele determined in the determining the HLA alleles for the donor cell and the recipient, respectively, includes an HLA-A allele, an HLA-B allele, and an HLA-C allele.

[0026] [3] The production method according to [1] or [2], further including: recovering the cell not expressing the HLA protein specific to the donor cell from the cell population after the obtaining of the cell population including the cell not expressing the HLA protein specific to the donor cell, in which the recovering includes bringing the cell population into contact with an HLA protein expression-inducing agent, and recovering the cell not expressing the HLA protein specific to the donor cell from the cell population using, as an index, expression of the HLA protein specific to the donor cell in the cell population brought into contact with the HLA protein expression-inducing agent.

[0027] [4] The production method according to [3], in which the HLA protein expression-inducing agent is interferon (IFN)-γ, IFN-α, IFN-β, interleukin (IL)-4, granulocyte macrophage colony-stimulating factor (GM-CSF), transforming growth factor (TGF)-α, or TGF-β.

[0028] [5] The production method according to any one of [1] to [4], in which the low-antigenic cell is a pluripotent stem cell.

[0029] [6] A kit for detecting a low-antigenic cell in which a rejection reaction is reduced in a case where the cell is allogeneically transplanted into a recipient, the kit comprising an HLA protein expression-inducing agent.

[0030] [7] The kit according to [6], in which the HLA protein expression-inducing agent is IFN-γ, IFN-α, IFN-β, IL-4, GM-CSF, TGF-α, or TGF-β.

[0031] [8] The kit according to [6] or [7], in which the low-antigenic cell is a pluripotent stem cell.

[0032] [9] An HLA protein expression-inducing agent consisting of IFN-γ, IFN-α, IFN-β, IL-4, GM-CSF, TGF-α, or TGF-β.

[0033] [10] A cell in which at least one HLA allele is disrupted or modified and at least one kind of HLA protein can be expressed.

[0034] [11] The cell according to [10], in which the HLA allele includes an HLA-A allele, an HLA-B allele, or an HLA-C allele.

[0035] [12] The cell according to [10] or [11], which is a low-antigenic cell in which a rejection reaction is reduced in a case where the cell is allogeneically transplanted into a recipient, and in which the disrupted or modified HLA allele is an HLA allele that is not present in the recipient.

[0036] [13] The cell according to any one of [10] to [12], which is a pluripotent stem cell.

[0037] [14] The cell according to any one of [10] to [13], in which at least one allele of a class II major histocompatibility complex transactivator (CIITA) allele, a regulatory factor X5 (RFX5) allele, a regulatory factor X associated protein (RFXAP) allele, or a regulatory factor X associated ankyrin containing protein (RFXANK) allele is further disrupted or modified.

[0038] [15] The cell according to any one of [10] to [14], in which the HLA-A allele and the HLA-B allele are disrupted and at least one kind of HLA-C protein can be expressed.

[0039] [16] The cell according to [15], in which the HLA-C protein is a protein encoded by one kind of allele selected from the group consisting of an HLA-C*01:02 allele, an HLA-C*02:02 allele, an HLA-C*03:03 allele, an HLA-C*03:04 allele, an HLA-C*04:01 allele, an HLA-C*05:01 allele, an HLA-C*06:02 allele, an HLA-C*07:01 allele, an HLA-C*07:02 allele, an HLA-C*08:01 allele, an HLA-C*12:02 allele, and an HLA-C*16:01 allele.

[0040] [17] A method for producing, from a donor cell, a low-antigenic cell in which a rejection reaction is reduced in a case where the cell is allogeneically transplanted into a recipient, the method including: disrupting or modifying an allele including at least one of a CIITA allele, an RFX5 allele, an RFXAP allele, and an RFXANK allele of the donor cell, in which a cell in which the CIITA allele, the RFX5 allele, the RFXAP allele, or the RFXANK allele is disrupted or modified is the low-antigenic cell.

[0041] [18] A cell according to [17], in which the low-antigenic cell is a pluripotent stem cell.

[0042] [19] A cell in which an allele including at least one of a CIITA allele, an RFX5 allele, an RFXAP allele, and an RFXANK allele is disrupted or modified.

[0043] [20] The cell according to [19], which is a pluripotent stem cell.

[0044] [21] A gRNA targeting, as a target base sequence, a base sequence that is mapped to only one target HLA haplotype in a case where the base sequence is mapped to base sequence data of genomic DNA of all HLA haplotypes, but that is not mapped in a case where the base sequence is mapped to base sequence data of all genomic DNA except for HLA alleles.

[0045] [22] The gRNA according to [21], in which the target base sequence consists of a base sequence set forth in any of SEQ ID NOs: 3, 4, 7, 45 to 52, and 72 to 2459, or a base sequence in which one or several bases are deleted, substituted, or added at a 5′ end of a base sequence set forth in any of SEQ ID NOs: 3, 4, 7, 45 to 52, and 72 to 2459.

[0046] [23] The gRNA according to or [22], in which the target base sequence consists of a base sequence set forth in any of SEQ ID NOs: 3, 4, 7, and 45 to 52, or a base sequence in which one or several bases are deleted, substituted, or added at a 5′ end of a base sequence set forth in any of SEQ ID NOs: 3, 4, 7, and 45 to 52.

[0047] [24] The gRNA according to any one of to [23], in which the target base sequence is mapped to an exon 2 or 3 of an HLA gene.

[0048] [25] A gRNA targeting, as a target base sequence, a base sequence that is mapped to two or more target HLA haplotypes in a case where the base sequence is mapped to base sequence data of genomic DNA of all HLA haplotypes, but that is not mapped in a case where the base sequence is mapped to base sequence data of all genomic DNA except for HLA alleles.

[0049] [26] The gRNA according to [25], in which the target base sequence consists of a base sequence set forth in any of SEQ ID NOs: 53 to 55 and 2460 to 8013, or a base sequence in which one or several bases are deleted, substituted, or added at a 5′ end of a base sequence set forth in any of SEQ ID NOs: 53 to 55 and 2460 to 8013.

[0050] [27] The gRNA according to or [26], in which the target base sequence consists of a base sequence set forth in any of SEQ ID NOs: 53 to 55, or a base sequence in which one or several bases are deleted, substituted, or added at a 5′ end of a base sequence set forth in any of SEQ ID NOs: 53 to 55.

[0051] [28] The gRNA according to any one of to [27], in which the target base sequence is mapped to an exon 2 or 3 of an HLA gene.

[0052] [29] A method for specifying a target base sequence for producing, by genome editing, a low-antigenic cell in which a rejection reaction is reduced in a case where the cell is allogeneically transplanted into a recipient, the method including: mapping a candidate base sequence to base sequence data of genomic DNA of all HLA haplotypes; mapping the candidate base sequence to base sequence data of all genomic DNA except for HLA alleles; and specifying, as a target base sequence, the candidate base sequence that is mapped to only one target HLA haplotype in a case where the base sequence is mapped to base sequence data of genomic DNA of all HLA haplotypes, but that is not mapped in a case where the base sequence is mapped to base sequence data of all genomic DNA except for the HLA alleles.

[0053] [30] A method for specifying a target base sequence for producing, by genome editing, a low-antigenic cell in which a rejection reaction is reduced in a case where the cell is allogeneically transplanted into a recipient, the method including: mapping a candidate base sequence to base sequence data of genomic DNA of all HLA haplotypes; mapping the candidate base sequence to base sequence data of all genomic DNA except for HLA alleles; and specifying, as a target base sequence, the candidate base sequence that is mapped to two or more target HLA haplotypes in a case where the base sequence is mapped to base sequence data of genomic DNA of all HLA haplotypes, but that is not mapped in a case where the base sequence is mapped to base sequence data of all genomic DNA except for the HLA alleles.

### Advantageous Effects of Invention

[0054] According to the present invention, it is possible to provide a technique for producing a low-antigenic cell in which a rejection reaction is reduced in a case where the cell is allogeneically transplanted into a recipient.

### BRIEF DESCRIPTION OF DRAWINGS

[0055] FIG. 1(a) is a Venn diagram showing HLA alleles targeted by sgRNAs extracted in Experimental Example 1. FIG. 1(b) is a diagram showing which sites of an HLA-A allele, an HLA-B allele, and an HLA-C allele sgRNAs identified in Experimental Example 1 target.

[0056] FIG. 2 is a graph showing results of flow cytometry in Experimental Example 2.

[0057] FIG. 3 is a graph showing results of flow cytometry in Experimental Example 3.

[0058] FIG. 4(a) is a graph showing results of flow cytometry in Experimental Example 4. FIG. 4(b) is a diagram showing a schedule for an IFN-γ treatment of iPS cells and analysis of an expression level of an HLA-A protein in Experimental Example 4.

[0059] FIG. 5(a) is a diagram showing target bases and target sites of sgRNAs in Experimental Example 6. FIG. 5(b) is a photograph showing results of a T7 endonuclease I assay in Experimental Example 6.

[0060] FIG. 6(a) and FIG. 6(b) are graphs showing results of flow cytometry in Experimental Example 7.

[0061] FIG. 7 is a graph showing a proportion of base sequence mutation of each clone in Experimental Example 7.

[0062] FIG. 8(a) and FIG. 8(b) are graphs showing results of flow cytometry in Experimental Example 8.

[0063] FIG. 9(a) and FIG. 9(b) are graphs showing results of flow cytometry in Experimental Example 8.

[0064] FIG. 10(a) is a table showing a base mutation pattern of each clone recovered in Experimental Example 8. FIG. 10(b) shows a base sequence of a representative clone recovered in Experimental Example 8.

[0065] FIG. 11 is a graph showing results of flow cytometry in Experimental Example 9.

[0066] FIG. 12(a) is a table showing a base mutation pattern of each clone recovered in Experimental Example 9. FIG. 12(b) shows a base sequence of a representative clone recovered in Experimental Example 9.

[0067] FIG. 13(a) and FIG. 13(b) are tables showing a base mutation pattern of each clone recovered in Experimental Example 10. FIG. 13(c) shows a base sequence of a representative clone recovered in Experimental Example 10.

[0068] FIG. 14(a) is a table showing a base mutation pattern of each clone recovered in Experimental Example 11. FIG. 14(b) shows a base sequence of a representative clone recovered in Experimental Example 11.

[0069] FIG. 15(a) is a graph showing results of flow cytometry in Experimental Example 11. FIG. 15(b) is a table showing a base mutation pattern of each clone recovered in Experimental Example 11. FIG. 15(c) shows a base sequence of a representative clone recovered in Experimental Example 11.

[0070] FIG. 16(a) is a diagram showing target sites of sgRNAs in Experimental Example 12. FIG. 16(b) and FIG. 16(c) are graphs showing results of flow cytometry in Experimental Example 12.

[0071] FIG. 17(a) is a table showing a base mutation pattern of a clone recovered in Experimental Example 12. FIG. 17(b) shows a base sequence of a clone recovered in Experimental Example 12.

[0072] FIG. 18(a) is a graph showing results of flow cytometry in Experimental Example 13. FIG. 18(b) and FIG. 18(d) are tables showing a base mutation pattern of each clone recovered in Experimental Example 13. FIG. 18(c) and FIG. 18(e) show a base sequence of a representative clone recovered in Experimental Example 13.

[0073] FIG. 19(a) and FIG. 19(b) are graphs showing results of flow cytometry in Experimental Example 14. FIG. 19(c) is a table showing a base mutation pattern of each clone recovered in Experimental Example 14. FIG. 19(d) shows a base sequence of a representative clone recovered in Experimental Example 14.

[0074] FIG. 20(a) is a diagram showing target sites of sgRNAs in Experimental Example 15. FIG. 20(b) and FIG. 20(c) are graphs showing results of flow cytometry in Experimental Example 15.

[0075] FIG. 21(a) and FIG. 21(b) are schematic diagrams illustrating homologous recombination in Experimental Example 16. FIG. 21(c) is a graph showing results of flow cytometry in Experimental Example 15.

[0076] FIG. 22(a) and FIG. 22(b) are diagrams showing results of analysis of a base sequence in Experimental Example 16.

[0077] FIG. 23(a) and FIG. 23(b) are graphs showing results of flow cytometry in Experimental Example 17. FIG. 23(c) is a diagram showing results of analysis of a base sequence in Experimental example 17.

[0078] FIG. 24(a) is a graph showing results of flow cytometry in Experimental Example 18. FIG. 24(b) is a diagram showing results of analysis of a base sequence in Experimental example 18.

[0079] FIG. 25(a) to FIG. 25(e) are graphs showing results of flow cytometry in Experimental Example 19.

[0080] FIG. 26(a) to FIG. 26(f) are graphs showing results of flow cytometry in Experimental Example 20.

[0081] FIG. 27(a) to FIG. 27(e) are graphs showing results of flow cytometry in Experimental Example 21.

[0082] FIG. 28 is a schematic diagram showing a procedure of Experimental Example 22.

[0083] FIG. 29(a) to FIG. 29(e) are graphs showing results of flow cytometry in Experimental Example 22.

[0084] FIG. 30 is a schematic diagram showing a procedure of Experimental Example 23.

[0085] FIG. 31 is a graph showing results of Experimental Example 23.

[0086] FIG. 32 is a graph showing results of Experimental Example 24.

[0087] FIG. 33 is a graph showing results of Experimental Example 25.

[0088] FIG. 34(a) and FIG. 34(b) are graphs showing results of flow cytometry in Experimental Example 26. FIG. 34(c) is a graph showing results of Experimental Example 26.

[0089] FIG. 35(a) to FIG. 35(g) are graphs showing results of flow cytometry in Experimental Example 27.

[0090] FIG. 36 is a graph showing results of Experimental Example 28.

[0091] FIG. 37(a) to FIG. 37(f) are phase-contrast micrographs showing results of Experimental Example 29.

[0092] FIG. 38(a) to FIG. 38(f) are phase-contrast micrographs showing results of Experimental Example 30.

[0093] FIG. 39(a) and FIG. 39(b) are graphs showing results of flow cytometry in Experimental Example 31. FIG. 39(c) is a graph showing results of Experimental Example 31.

[0094] FIG. 40(a) and FIG. 40(b) are graphs showing results of flow cytometry in Experimental Example 32. FIG. 40(c) is a graph showing results of Experimental Example 32.

[0095] FIG. 41(a) is a diagram illustrating an experimental schedule in Experimental Example 33. FIG. 41(b) shows a photograph showing results of capturing fluorescence of EB-derived blood-cell-like cells in Experimental Example 33. FIG. 41(c) is a graph showing a survival rate of the EB-derived blood-cell-like cells in Experimental Example 33.

[0096] FIG. 42(a) is a graph showing results of flow cytometric analysis in Experimental Example 34. FIG. 42(b) is a graph showing results of Experimental Example 34.

[0097] FIG. 43(a) is a graph showing results of flow cytometric analysis in Experimental Example 35. FIG. 43(b) is a graph showing results of Experimental Example 35.

[0098] FIG. 44(a) and FIG. 44(b) are graphs showing results of flow cytometric analysis in Experimental Example 36.

[0099] FIG. 45(a) is a diagram illustrating an experimental schedule in Experimental Example 37. FIG. 45(b) shows a photograph showing results of capturing fluorescence of EB-derived blood-cell-like cells in Experimental Example 37. FIG. 45(c) is a graph showing a relative survival rate of the EB-derived blood-cell-like cells in Experimental Example 37.

[0100] FIG. 46 is a graph showing results of Experimental Example 38.

[0101] FIG. 47(a) is a table showing an HLA haplotype of 585A1-C7 residual cells used in Experimental Example 39, and an HLA haplotype of 585A1-C7 residual cells in which a CIITA gene was knocked out and which were produced in Experimental Example 39. FIG. 47(b) is a table showing a base mutation pattern of each clone obtained in Experimental Example 39. FIG. 47(c) shows a base sequence of a representative clone obtained in Experimental Example 39.

[0102] FIG. 48(a) to FIG. 48(d) are graphs showing results of flow cytometry in Experimental Example 40.

[0103] FIG. 49(a) to FIG. 49(c) are graphs showing results of flow cytometry in Experimental Example 41.

[0104] FIG. 50(a) to FIG. 50(c) are diagrams illustrating a procedure of Experimental Example 42.

[0105] FIG. 51(a) is a graph showing results of flow cytometry in Experimental Example 42. FIG. 51(b) is a table showing a base mutation pattern of each subclone obtained in Experimental Example 42.

[0106] FIG. 52(a) and FIG. 52(b) are tables showing a base mutation pattern of each subclone obtained in Experimental Example 42.

[0107] FIG. 53 is a table showing allele frequency of an HLC-C allele in various races.

[0108] FIG. 54 is a table showing a base mutation pattern of each subclone obtained in Experimental Example 43.

[0109] FIG. 55 is a table showing a base mutation pattern of each subclone obtained in Experimental Example 44. FIG. 56(a) and FIG. 56(b) are graphs showing results of flow cytometry in Experimental Example 45.

[0110] FIG. 57 is a graph showing results of flow cytometry in Experimental Example 46.

[0111] FIG. 58 is a table showing a base mutation pattern of each subclone obtained in Experimental Example 47.

[0112] FIG. 59 is a table showing a base mutation pattern of each subclone obtained in Experimental Example 48.

[0113] FIG. 60 is a table showing a base mutation pattern of each subclone obtained in Experimental Example 49.

### DESCRIPTION OF EMBODIMENTS

[Method for Producing a Low-Antigenic Cell with Reduced Rejection Reaction]

### First Embodiment

[0114] A production method of the first embodiment is a method for producing, from a donor cell, a low-antigenic cell in which a rejection reaction is reduced in a case where the cell is allogeneically transplanted into a recipient, the method including: (a) determining HLA alleles for the donor cell and the recipient, respectively; (b) specifying an HLA allele that is present in the donor cell but is not present in the recipient; and (c) disrupting or modifying the specified HLA allele to obtain a cell population including a cell not expressing an HLA protein specific to the donor cell, in which the cell not expressing the HLA protein specific to the donor cell is the low-antigenic cell.

[0115] As described below in Examples, according to the production method of the first embodiment, it is possible to produce low-antigenic cells with reduced rejection reaction (graft-versus-host disease) when the cells are allogeneically transplanted into a recipient. Furthermore, as will be described later in Examples, low-antigenic cells produced by the production method of the first embodiment are less likely to be attacked by NK cells of a recipient even in a case where the cells are allogeneically transplanted into the recipient.

[0116] In the present specification, an HLA genetic locus may be referred to as an “HLA allele”, and antigenic diversity of HLA proteins displayed on a cell surface may be referred to as an “HLA type.” Hereinafter, each of the steps will be described.

### (Step (a))

[0117] In the present step, HLA alleles of a donor cell and a recipient are respectively determined. The donor cell may be a human cell or a non-human animal cell. Furthermore, the donor cell may be a pluripotent stem cell or a differentiated cell. In the present specification, pluripotent stem cells mean embryonic stem cells (ES cells), induced pluripotent stem cells (iPS cells), and the like.

[0118] Furthermore, low-antigenic cells produced by the production method of the first embodiment are cells in which an HLA allele of donor cells has been disrupted or modified. Accordingly, the low-antigenic cell may be a pluripotent stem cell similar to the donor cell, or may be a differentiated cell.

[0119] Furthermore, a recipient is preferably an animal of the same species as the low-antigenic cells. The recipient may be a patient who is actually scheduled for transplantation, or may be a recipient having a hypothetical HLA allele that can be a recipient in the future.

[0120] HLA alleles can be determined by methods of the related art such as a PCR-rSSO method (PCR-reverse Sequence Specific Oligonucleotide), a PCR-SSP (Sequence specific primer) method, a PCR-SBT (Sequence based typing) method, and a next-generation sequencing method, and the determination can be carried out using a commercially available HLA typing kit or the like. In addition, HLA reporter, HLA-PRG, hla-genotyper, PHLAT, Optitype, neXtype, Athlates, HLAforest, SOAP-HLA, HLAminer, seq2HLA, GATK HLA Caller, and the like are known as software for performing HLA typing from sequence data of next-generation sequencers such as whole genome sequence (WGS), exome sequence (WES), and RNA-seq.

[0121] The HLA allele determined in the present step is preferably an HLA allele highly relevant to a rejection reaction upon cell transplantation, and preferably includes an HLA-A allele, an HLA-B allele, and an HLA-C allele.

[0122] The HLA allele determined in the present step may further include an HLA-DR allele, an HLA-DQ allele, and an HLA-DP allele, and may further include other HLA alleles.

### (Step (b))

[0123] In the present step, an HLA allele not present in a recipient but present in donor cells (hereinafter, may be referred to as “donor-specific HLA allele”) is specified. Donor-specific HLA alleles can be specified by comparing an HLA allele of donor cells and an HLA allele of a recipient.

[0124] The HLA allele is a base sequence encoded on genomic DNA and encodes the HLA protein. Serological classification of HLA proteins is called HLA serotype. Examples of methods for identifying an HLA serotype include a method of analyzing reactivity with a serum or an antibody that recognizes a specific HLA serotype; a method of collating a base sequence of DNA of an HLA allele or an RNA transcribed from the HLA allele with existing correspondence tables, IPD-IMGT database, and the like; and the like.

[0125] The HLA serotype generally refers to a difference in a first section (two-digit notation) of the HLA allele notation, but in the present specification, even in a case where an HLA serotype is the same serologically, in a case where amino acid sequences are different (non-synonymous substitution), it is determined that HLA alleles are different HLA alleles.

[0126] Specifically, it is determined whether alleles are the same HLA alleles or different HLA alleles from a difference between the first section and the second section (four-digit notation) in the HLA allele notation. Then, it is determined that whether HLA alleles in which the first section and the second section indicated by the HLA allele notation are the same HLA alleles. Furthermore, in a case where it is necessary to distinguish base sequences of genome such as in a case of determining a target sequence for genome editing, differences in the third section (a base substitution in a translation region not associated with an amino acid mutation) and the fourth section (a base substitution outside the translation region) may also be considered.

### (Step (c))

[0127] In a case where cells having an HLA protein of an HLA serotype that are not present in a recipient are allogeneically transplanted into the recipient, a rejection reaction occurs, and thereby the transplanted cells are rejected. Accordingly, in the present step, a cell population is obtained, which contains cells that disrupt or modify the donor-specific HLA allele and do not express the donor cell-specific HLA protein (hereinafter, also referred to as “donor-specific HLA protein”).

[0128] A cell that does not express a donor-specific HLA protein refers to a cell in which the expression of a specific HLA protein is negative due to the disruption of an HLA allele of donor cells, or a cell changed from a specific HLA type to another HLA type by modifying the HLA allele of the donor cells.

[0129] A cell that does not express the donor-specific HLA protein obtained in the present step is a low-antigenic cell. In a case where the donor-specific HLA protein is not present, the present step is unnecessary.

[0130] It is preferable that a B2M gene be not disrupted in low-antigenic cells produced by the production method of the first embodiment. As a result, a class I HLA protein is present on a cell surface, and even in a case where low-antigenic cells are allogeneically transplanted into a recipient, the cells are less likely to be attacked by NK cells of the recipient. In addition, because only part of HLA is disrupted and the remaining HLA retains an antigen-presenting ability, the antigen-presenting ability can be maintained even in a case where the cell is infected with a virus or becomes a tumor.

### <Genome Editing>

[0131] As will be described later in Examples, disruption or modification of HLA alleles of donor cells can be performed by, for example, genome editing. Disruption of HLA alleles can be performed by specifically cleaving the HLA alleles and inducing double-stranded DNA break (DSB). In a case where a base is deleted or added to cause a frameshift mutation in a DSB repairing process, HLA alleles are disrupted, and thereby an HLA protein is not expressed. In the present specification, disruption of the HLA alleles may be referred to as knockout of the HLA alleles.

[0132] Furthermore, by specifically cleaving the HLA alleles in the presence of donor DNA and inducing DSB, it is possible to induce homologous recombination in the DSB repairing process and modify the HLA alleles. Specifically, for example, an HLA-A*02:07 allele can be modified to an HLA-A*01:01 allele, as will be described later in Examples.

[0133] As the donor DNA, donor DNA having a sequence identity with a region including before and after a position of double-stranded DNA cleavage of genomic DNA and encoding a desired HLA allele may be used. The donor DNA may be single-stranded DNA or double-stranded DNA. The donor DNA may be a DNA having a single base sequence or a mixture of DNAs having a plurality of base sequences.

[0134] The phrase “having a sequence identity” means that 90% or more of base sequences match a region including double-strand break positions of donor DNA and target genomic DNA. In the donor DNA, 95% or more of base sequences preferably match and 99% or more of base sequences more preferably match the region including the double-strand break positions in the genomic DNA.

[0135] The donor DNA may be single-stranded DNA of about 50 to 5,000 bases or double-stranded DNA of about 50 to 5,000 base pairs. In a case where the donor DNA is single-stranded DNA, the donor DNA may have sequence identity with any of the double strands of genomic DNA.

### <Sequence-Specific DNA-Cleaving Enzyme>

[0136] In general, sequence-specific DNA-cleaving enzymes used for inducing DSB to perform genome editing are roughly classified into RNA-induced nucleases and artificial nucleases. The sequence-specific DNA-cleaving enzyme may be an RNA-induced nuclease or an artificial nuclease.

[0137] The sequence-specific DNA-cleaving enzyme is not particularly limited as long as it cleaves genomic DNA in a target sequence-specific manner to form a double-strand break. A length of a target sequence recognized by the sequence-specific DNA-cleaving enzyme may be, for example, about 10 to 60 bases.

[0138] Furthermore, the sequence-specific DNA-cleaving enzyme may be, for example, in a form in which a plurality of nickases are combined to cleave DNA. The nickase means an enzyme that forms a nick in a single strand of double-stranded DNA. For example, a double-strand break can be formed by forming nickases at both strands of double-stranded DNA at close locations on genomic DNA.

[0139] The RNA-induced nuclease is an enzyme that guides a short-chain RNA that binds to a target sequence and recruits a nuclease having two DNA cleavage domains (nuclease domains) to induce sequence-specific cleavage. Examples of RNA-induced nucleases include CRISPR-Cas family proteins. The CRISPR-Cas family proteins are roughly classified into class 1 and class 2. Class 1 includes type I, type III, and type IV, and class 2 includes type II, type V, and type VI.

[0140] Examples of CRISPR-Cas family protein include Cas9, Cpf1, CasX, CasY, Cas12, Cas13, C2C2, and the like. The RNA-derived nuclease may be a homologue of a CRISPR-Cas family protein or a modified CRISPR-Cas family protein. For example, it may be a nickase-modified nuclease in which one of two existing wild-type nuclease domains is modified to be inactive. Alternatively, it may be Cas9-HF, HiFi-Cas9, eCas9, or the like having improved target specificity.

[0141] Examples of Cas9 include those derived from Pseudomonas aeruginosa, Staphylococcus aureus, Streptococcus thermophilus, Geobacillus stearothermophilus, and the like. Examples of Cpf1 include those derived from Acidaminococcus, Lachnospira, Chlamydomonas, Francicella-Novicida, and the like.

[0142] The artificial nuclease is an artificial restriction enzyme having a DNA binding domain designed/produced to specifically bind to a target sequence and a nuclease domain (such as a DNA cleavage domain of FokI which is a restriction enzyme). Examples of artificial nucleases include Zinc finger nuclease (ZFN), Transcription activator-like effector nuclease (TALEN), meganucleases, and the like, but examples are not limited thereto.

### <<Introduction of Sequence-Specific DNA-Cleaving Enzyme>>

[0143] For example, in a case where CRISPR-Cas is used as the sequence-specific DNA-cleaving enzyme introduced into donor cells, a target base sequence is determined by gRNA. Details of gRNA will be described later. A gRNA may be introduced into donor cells in the form of RNA, or may be introduced into the donor cells in the form of an expression vector and expressed intracellularly.

[0144] Examples of methods of preparing a gRNA in the form of RNA include a method of producing a construct in which a promoter such as T7 is added upstream of a nucleic acid fragment encoding gRNA, and synthesizing by an in vitro transcription reaction; a method of chemical synthesis; and the like. In the case of chemically synthesizing gRNA, chemically modified RNA may be used.

[0145] Examples of expression vectors include a plasmid vector or a viral vector which transcribes gRNA from Pol III promoter such as H1 promoter or U6 promoter. In a case where gRNA is expressed using an expression vector, gRNA may be expressed constitutively or may be expressed under the control of an expression-inducible promoter.

[0146] Subsequently, Cas9 is prepared. Cas9 may be introduced into donor cells in the form of an expression vector that is expressed from a Pol II promoter, or may be introduced into the donor cells in the form of a purified protein. Examples of expression vectors include transposon vectors, virus vectors, episomal vectors, plasmid vectors, and the like.

[0147] In introduction of gRNA and Cas9 into donor cells, in a case where the gRNA and Cas9 are in the form of a viral vector, it is sufficient for the gRNA and Cas9 be added to a medium of the donor cells. Examples of viral vectors include adeno-associated virus vectors, adenovirus vectors, retrovirus vectors, lentivirus vectors, Sendai virus vectors, baculovirus vectors, and the like.

[0148] In a case where gRNA and Cas9 are transposon vectors, episomal vectors, plasmid vectors, or the like, or in a case where the gRNA is RNA and the Cas9 is a purified protein, they may be introduced into donor cells by a transfection reagent or an electroporation method.

[0149] As the transfection reagent, for example, it is possible to use Lipofectamine 2000, Lipofectamine 3000, CRISPRMAX, and RNAMAX (all of which are from Thermo Fisher Scientific); FuGENE 6 and FuGENE HD (both are from Promega); and the like.

[0150] In addition, the electroporation method can be performed using a device such as NEPA21 (Neppagene Co., Ltd.), Neon (Thermo Fisher Scientific), and 4D-Nucleofector (Lonza Co., Ltd.).

### (Step (d))

[0151] In the step (c), it is possible to obtain the cell population which includes low-antigenic cells and which does not express a donor-specific HLA protein. However, the cell population obtained in step (c) may include, in addition to cells (low-antigenic cells) in which desired HLA alleles are disrupted or modified, cells in which HLA alleles are not disrupted or modified, cells in which HLA alleles are not completely disrupted or modified, and the like. Accordingly, after the step (c), a step (d) of recovering cells (low-antigenic cells) that do not express the donor-specific HLA protein may be further performed.

[0152] The step (d) includes step of bringing the cell population including low-antigenic cells into contact with an agent for inducing HLA protein expression (HLA protein expression-inducing agent), and recovering the cell not expressing the HLA protein specific to the donor cell from the cell population using, as an index, expression of the HLA protein specific to the donor cell in the cell population brought into contact with the HLA protein expression-inducing agent. The step of bringing the HLA protein expression-inducing agent into contact with the cell population can be performed, for example, by adding the HLA protein expression-inducing agent to a medium of the cell population.

[0153] In the present step, to recover cells that do not express the donor-specific HLA protein from the cell population using the expression of the donor-specific HLA protein as an index means to detect the presence of the expressed HLA protein, to detect the presence or absence of the expressed HLA protein, and to recover cells that do not express the donor-specific HLA protein.

[0154] Examples of HLA protein expression-inducing agents include cytokines such as IFN-γ, IFN-α, IFN-β, IL-4, GM-CSF, TGF-α, and TGF-β. These expression-inducing agents may be used alone or in combination of two or more kinds thereof.

[0155] In a case where the above-mentioned cytokines are used in human cells, the cytokines are preferably human-derived cytokines. The NCBI accession numbers of human IFN-γ protein are NP_000610.2 and the like. The NCBI accession numbers of human IFN-α protein are NP_076918.1, NP_000596.2, NP_066546.1, and the like. The NCBI accession numbers of human IFN-β protein are NP_002167.1 and the like. The NCBI accession numbers of human IL-4 protein are NP_000580.1, NP_758858.1, NP 001341919.1, and the like. The NCBI accession numbers of human GM-CSF protein are NP_000749.2, and the like. The NCBI accession numbers of human TGF-α protein are NP_001093161.1, NP_003227.1, NP_001295088.1, NP_001295087.1, and the like. The NCBI accession numbers of human TGF-β protein are NP_000651.3, XP_011525544.1, and the like.

[0156] The above-mentioned cytokine may have a mutation in an amino acid sequence described in each of the above-mentioned accession numbers as long as it has an activity of inducing the expression of HLA protein. More specifically, it may have an amino acid sequence in which one or several amino acids are deleted, substituted, or added in an amino acid sequence described in each of the above accession numbers. One or several amino acids may be, for example, 1 to 10 amino acids, for example, 1 to 5 amino acids, and for example, 1 to 3 amino acids. The above-mentioned cytokine may further have an amino acid sequence from which a signal peptide has been removed.

[0157] It is known that pluripotent stem cells generally do not express the HLA protein on the cell surface in an undifferentiated state, and therefore it is difficult to detect the HLA protein. In order to display the HLA protein, it is necessary to induce differentiation. However, a differentiation induction process is generally complicated and time consuming. In addition, because cells that have once been differentiation-induced do not spontaneously return to an undifferentiated state, even in a case where an HLA protein-negative differentiated cell population is recovered, it is no longer a pluripotent stem cell.

[0158] The inventors of the present invention have revealed that it is possible induce the expression of HLA protein while maintaining pluripotency of pluripotent stem cells by causing the above-mentioned HLA protein expression-inducing agent to act on pluripotent stem cells.

[0159] Accordingly, the expression of the HLA protein in the cell population obtained in the step (d) is induced, and thereby pluripotent stem cells (low-antigenic cells) in which desired HLA alleles are disrupted or modified can be efficiently detected and recovered.

[0160] For example, after inducing the expression of HLA protein in cells, by staining the cells with an anti-HLA protein antibody, it is possible to distinguish HLA-expressing cells or HLA-non-expressing cells with a flow cytometer and recover them by sorting.

[0161] Alternatively, an anti-HLA protein antibody may be adsorbed on magnetic beads and brought into contact with HLA protein-expressing cells. Then, the cells to which the magnetic beads are bonded can be recovered using magnetic force.

[0162] Alternatively, cells expressing a specific HLA protein on a culture dish are labeled with an anti-HLA protein antibody or the like, unnecessary undesired cells are removed by suction or laser irradiation, and thereby only target low-antigenic cells may be recovered.

[0163] Alternatively, HLA protein-expressing cells on a culture dish are mixed with T cells that recognize an undesired HLA protein, only cells expressing the undesired HLA protein are attacked and removed, and thereby only target low-antigenic cells may be recovered.

[0164] The production method of the first embodiment may further include a step of disrupting or modifying an allele including at least one allele of a CIITA allele, an RFX5 allele, an RFXAP allele, and an RFXANK allele of the donor cell. A CIITA gene is a gene encoding a Class II Major Histocompatibility Complex Transactivator protein. Furthermore, an RFX5 gene is a gene encoding a Regulatory Factor X5 protein. Furthermore, an RFXAP gene is a gene encoding a Regulatory Factor X Associated Protein. Furthermore, an RFXANK gene is a gene encoding a Regulatory Factor X Associated Ankyrin Containing Protein.

[0165] The CIITA gene, together with the RFX5 gene, the RFXAP gene, and the RFXANK gene, encodes a transcription factor that controls transcriptional activation of HLA class II. Accordingly, for cells in which at least one of the CIITA allele, the RFX5 allele, the RFXAP allele, and the RFXANK allele is disrupted do not express the HLA class II protein, a rejection reaction in a case where the cells are allogeneically transplanted into a recipient is further reduced.

[0166] The NCBI accession numbers of the human CIITA gene are NM_000246.3, NM_001286402.1, NM_001286403.1, and the like. The NCBI accession numbers of human RFX5 gene are NM_000449.3, NM_001025603.1, and the like. The NCBI accession numbers of the human RFXAP gene is NM_000538.3, and the like. The NCBI accession numbers of the human RFXANK gene are NM_001278727.1, NM_001278728.1, NM_003721.3, NM_134440.2, and the like.

### Second Embodiment

[0167] A production method according to a second embodiment is a method for producing, from a donor cell, a low-antigenic cell in which a rejection reaction is reduced in a case where the cell is allogeneically transplanted into a recipient, the method including: disrupting or modifying an allele including at least one of a CIITA allele, an RFX5 allele, an RFXAP allele, and an RFXANK allele of the donor cell, in which a cell in which an allele including at least one of the CIITA allele, the RFX5 allele, the RFXAP allele, or the RFXANK allele is disrupted or modified is the low-antigenic cell. The production method of the present embodiment mainly differs from the production method of the first embodiment described above in that HLA alleles are not disrupted.

[0168] As described above, expression of the CIITA gene, the RFX5 gene, the RFXAP gene, and the RFXANK gene is known to be essential for expression of class II HLA protein. Accordingly, for cells in which at least one of the CIITA allele, the RFX5 allele, the RFXAP allele, and the RFXANK allele is disrupted do not express the HLA class II protein, a rejection reaction in a case where the cells are allogeneically transplanted into a recipient is reduced.

[0169] In the production method of the second embodiment, donor cells may be pluripotent stem cells similar to those described above, or may be differentiated cells.

[0170] Furthermore, a recipient is preferably an animal of the same species as the low-antigenic cells. The recipient may be a patient who is actually scheduled for transplantation, or may be a recipient having a hypothetical HLA allele that can be a recipient in the future.

[0171] Furthermore, as described above, cells in which a B2M allele is disrupted do not express an HLA class I protein even in a case where an HLA allele is wild type. The production method of the second embodiment may further include a step of disrupting a B2M allele of a donor cell.

[0172] Disruption of the CIITA allele or the B2M allele of the donor cell can be performed by, for example, genome editing. The genome editing is the same as described above.

### [Kit for Detecting Low-Antigenic Cell]

[0173] In one embodiment, the present invention provides a kit for detecting a low-antigenic cell in which a rejection reaction is reduced in a case where the cell is allogeneically transplanted into a recipient, the kit including an HLA protein expression-inducing agent. Low-antigenic cells can be detected and recovered by the kit of the present embodiment. Accordingly, it can be said that the kit of the present embodiment is a kit for recovering low-antigenic cells.

[0174] In the kit of the present embodiment, an HLA protein expression-inducing agent is the same as described above, and examples thereof include cytokines such as IFN-γ, IFN-α, IFN-β, IL-4, GM-CSF, TGF-α, and TGF-β. The kit of the present embodiment may include one of these expression-inducing agent alone or may include two or more kinds thereof.

[0175] In the kit of this embodiment, low-antigenic cells may be pluripotent stem cells. As will be described later in Examples, according to the kit of the present embodiment, even in a case where low-antigenic cells are pluripotent stem cells, expression of the HLA protein is induced while still maintaining pluripotency of the low-antigenic cells.

### [Cell]

### First Embodiment

[0176] A cell according to the first embodiment is a cell in which at least one HLA allele is disrupted or modified and at least one kind of HLA protein can be expressed. The cell of the first embodiment may be a pluripotent stem cell or a differentiated cell. In the cell of the first embodiment, at least one HLA allele that has been disrupted or modified is preferably a class I HLA allele.

[0177] Pluripotent stem cells generally have weak expression of HLA protein. The term “weak expression” means that, for example, expression of the HLA protein cannot be clearly detected even though cells are stained with an anti-HLA protein antibody and subjected to flow cytometric analysis.

[0178] However, as will be described later in Examples, in a case where the HLA protein expression-inducing agent is brought into contact with pluripotent stem cells, expression of an HLA protein is enhanced. In the cell of the first embodiment, the phrase “capable of expressing at least one HLA protein” means that the cell is a cell in which expression of the HLA protein is enhanced by bringing the HLA protein expression-inducing agent into contact with the cells even in a case where the cell is a cell in which expression of the HLA protein generally usually weak, such as pluripotent stem cells. Furthermore, the cell of the first embodiment may be a differentiated cell in which the HLA protein is expressed.

[0179] As will be described later in Examples, for example, cells in which a B2M allele is disrupted do not express an HLA class I protein even in a case where an HLA allele is wild type. The cell of the first embodiment do not include such cells.

[0180] In the cell of the first embodiment, a disrupted or modified HLA allele preferably includes a class I HLA allele, and preferably includes an HLA-A allele, an HLA-B allele, or an HLA-C allele.

[0181] Since the cell of the first embodiment expresses the at least one class I HLA protein, the cell is less likely to be attacked by NK cells of a recipient even in a case where the cell is allogeneically transplanted into the recipient. The at least one class I HLA protein includes an HLA-C protein, an HLA-E protein, an HLA-G protein, and the like. In the cell of the first embodiment, because only part of HLA is disrupted and the remaining HLA retains an antigen-presenting ability, the antigen-presenting ability can be maintained even in a case where the cell is infected with a virus or becomes a tumor.

[0182] The cell of the first embodiment may be a low-antigenic cell in which a rejection reaction is reduced in a case where the cell is allogeneically transplanted into a recipient, in which the disrupted or modified HLA allele is an HLA allele that is not present in the recipient. In the above-mentioned low-antigenic cell, a rejection reaction is reduced in a case where the cells is allogeneically transplanted to a recipient.

[0183] The low-antigenic cell of the first embodiment is preferably a cell of the same species as a recipient, and may be a human cell or a non-human animal cell. The recipient may be a patient who is actually scheduled for transplantation, or may be a recipient having a hypothetical HLA allele that can be a recipient in the future.

[0184] In the cell of the first embodiment, an allele including at least one of a CIITA allele, an RFX5 allele, an RFXAP allele, and an RFXANK allele may be further disrupted or modified. As described above, expression of the CIITA gene, the RFX5 gene, the RFXAP gene, and the RFXANK gene is known to be essential for expression of class II HLA protein. Accordingly, for cells in which at least one of the CIITA allele, the RFX5 allele, the RFXAP allele, and the RFXANK allele is disrupted do not express the HLA class II protein, a rejection reaction in a case where the cells are allogeneically transplanted into a recipient is further reduced.

### Second Embodiment

[0185] A cell according to the second embodiment is a cell in which an allele including at least one of a CIITA allele, an RFX5 allele, an RFXAP allele, and an RFXANK allele is disrupted or modified. As described above, a cell, in which an allele including at least one of the CIITA allele, the RFX5 allele, the RFXAP allele, and the RFXANK allele is disrupted or modified do not express the HLA class II protein, is a low-antigenic cell in which a rejection reaction in a case where the cell is allogeneically transplanted into a recipient is reduced.

[0186] The cell according to the second embodiment may express an HLA class I protein. The cell of the second embodiment may be useful for allogeneic transplantation into a recipient.

[0187] The cell of the second embodiment may be a pluripotent stem cell or a differentiated cell. Furthermore, as described above, cells in which a B2M allele is disrupted do not express an HLA class I protein even in a case where an HLA allele is wild type. In the cell of the second embodiment, a B2M allele may be further disrupted in addition to the at least one of the CIITA allele, the RFX5 allele, the RFXAP allele, and the RFXANK allele.

[0188] A low-antigenic cell of the second embodiment is preferably a cell of the same species as a recipient, and may be a human cell or a non-human animal cell. The recipient may be a patient who is actually scheduled for transplantation, or may be a recipient having a hypothetical HLA allele that can be a recipient in the future.

### (Usage Applications of Low-Antigenic Cells)

[0189] The cells of the first embodiment and the second embodiment described above are low-antigenic cells in which a rejection reaction in a case where the cells are allogeneically transplanted into a recipient is reduced. Accordingly, the cells can be used for cell therapy and regenerative medicine.

[0190] In a case where low-antigenic cells are pluripotent stem cells, for example, the cells may be differentiated into nerve cells, hepatocytes, pancreatic islet cells, cardiomyocytes, kidney cells, hematopoietic stem cells, cytotoxic T cells, and the like, and then the cells may be transplanted into a patient.

[0191] Alternatively, the low-antigenic cells may be introduced into a patient after gene transfection. For example, after differentiation of pluripotent stem cells into T cells, gene transfection of a chimeric antigen receptor (CAR) is performed, and transplantation into cancer patients as CAR-T cells is performed.

### [Method of Specifying Target Base Sequence]

### First Embodiment

[0192] In one embodiment, the present invention provides a method for specifying a target base sequence for producing, by genome editing, a low-antigenic cell in which a rejection reaction is reduced in a case where the cell is allogeneically transplanted into a recipient, the method including: mapping a candidate base sequence to base sequence data of genomic DNA of all HLA haplotypes; mapping the candidate base sequence to base sequence data of all genomic DNA except for HLA alleles; and specifying, as a target base sequence, the candidate base sequence that is mapped to only one target HLA haplotype in a case where the base sequence is mapped to base sequence data of genomic DNA of all HLA haplotypes, but that is not mapped in a case where the base sequence is mapped to base sequence data of all genomic DNA except for the HLA alleles.

[0193] By the method of the first embodiment, a target base sequence of the gRNA of the first embodiment to be described later can be specified. As described below, the gRNA of the first embodiment can specifically induce DSB in an HLA haplotype-specific manner, which makes the risk of off-target mutation introduction low.

[0194] As described above, an HLA gene has many pseudogenes, HLA gene sequences are highly homologous to each other, and sequence diversity among individuals is large. Accordingly, it is not easy to determine an appropriate target base sequence for genome editing using a sequence-specific DNA-cleaving enzyme.

[0195] A target base sequence of a sequence-specific DNA-cleaving enzyme specific to an HLA gene can be specified, for example, as follows. First, base sequence data of genomic DNA of all HLA haplotypes (base sequence data of all known HLA genes) is obtained. The base sequence data of all HLA genes can be obtained from, for example, IPD-IMGT/HLA database. As of July 2017, 12,544 base sequences of HLA class I genes and 4,622 base sequences of HLA class II genes have been registered in the present database.

[0196] Subsequently, a base sequence which is a target of a sequence-specific DNA-cleaving enzyme to be used is extracted from a base sequence of each HLA allele. For example, in a case where CRISPR-Cas is used as a sequence-specific DNA-cleaving enzyme, a base sequence, which includes a PAM sequence of about 3 to 5 bases (for example, “NGG” for Cas9 derived from Streptococcus pyogenes, “TTTN” for Cpf1 derived from Acidaminococcus) and which is usable as a target base sequence of gRNA, is extracted as a candidate base sequence.

[0197] In the method of the present embodiment, a target base sequence is assumed to include the PAM sequence. A length of the target base sequence including the PAM sequence varies depending on sequence-specific DNA-cleaving enzymes. For example, in a case where a sequence-specific DNA-cleaving enzyme is Cas 9 derived from Pseudomonas aeruginosa, a length of the target base sequence including the PAM sequence is preferably 19 to 33 bases, and is more preferably 20 to 24 bases. Furthermore, in a case where a sequence-specific DNA-cleaving enzyme is Cpf1 derived from Acidaminococcus, a length of the target base sequence including the PAM sequence is preferably 20 to 34 bases, and more preferably about 24 bases.

[0198] Subsequently, a candidate base sequence including the PAM sequence is mapped to the base sequence data of the genomic DNA of all HLA haplotypes.

[0199] Mapping refers to an operation of specifying a position having high sequence identity in a query base sequence (meaning a candidate base sequence herein) on a reference base sequence (meaning base sequence data of genomic DNA of all HLA haplotypes herein). A sequence identity between the query base sequence and the reference base sequence is preferably 90% or more, more preferably 95% or more, even more preferably 99% or more, and particularly preferably 100%.

[0200] The sequence identity of the query base sequence with respect to the reference base sequence can be determined as follows, for example. First, the reference base sequence and the query base sequence are aligned. Subsequently, the number of bases of matched bases in the reference base sequence and the query base sequence can be calculated, and a sequence identity can be determined according to Formula (1).

Sequence identity (%)=number of matched bases/total number of bases in query base sequence×100 (1)

[0201] As will be described later in Examples, mapping can be performed using, for example, a Bowtie program. In addition, mapping may be performed using a sequence homology (sequence identity) search program other than the Bowtie program, such as BWA, BLAST, BLAT, SOAP, Novoalign, and TopHat.

[0202] Subsequently, the candidate base sequence is mapped to base sequence data of all genomic DNA except for HLA alleles. A reference human genome sequence (Hg19) or the like can be used as base sequence data of total genomic DNA. In addition, for mapping, the Bowtie program or a sequence homology search program other than the Bowtie program can be used.

[0203] Subsequently, a candidate base sequence, that is mapped to only one target HLA haplotype in a case where the base sequence is mapped to base sequence data of genomic DNA of all HLA haplotypes, but that is not mapped in a case where the base sequence is mapped to base sequence data of all genomic DNA except for HLA alleles, is specified as a target base sequence. The target HLA haplotype means a target HLA haplotype to be disrupted or modified.

[0204] As will be described later in Examples, a gRNA targeting the target base sequence specified by the method of the first embodiment as a target base sequence (the gRNA of the first embodiment to be described later) can induce a DSB specific to a target specific HLA haplotype, which makes the risk of off-target mutagenesis low.

[0205] Even though an HLA gene is composed of eight exons in many cases, the target base sequence preferably targets a protein coding region of the HLA gene. The target base sequence preferably targets an exon 1, 2, 3, or 4 encoding an extracellular domain of the HLA protein, and particularly preferably targets the exon 2 or 3.

[0206] Alternatively, in a case where the target base sequence is set at two positions, a base sequence between therebetween can be largely deleted. In order to utilize this deletion, two or more target base sequences may be designed to include a gene region encoding a protein of HLA gene.

[0207] Furthermore, the target base sequence preferably does not target other genomic regions other than the HLA gene or mitochondrial DNA. Furthermore, even in a case where a mismatch of several bases is allowed, it is preferable to select a target base sequence that has few sites targeting regions other than the HLA gene.

### Second Embodiment

[0208] In one embodiment, the present invention provides a method for specifying a target base sequence for producing, by genome editing, a low-antigenic cell in which a rejection reaction is reduced in a case where the cell is allogeneically transplanted into a recipient, the method including: mapping a candidate base sequence to base sequence data of genomic DNA of all HLA haplotypes; mapping the candidate base sequence to base sequence data of all genomic DNA except for HLA alleles; and specifying, as a target base sequence, the candidate base sequence that is mapped to two or more target HLA haplotypes in a case where the base sequence is mapped to base sequence data of genomic DNA of all HLA haplotypes, but that is not mapped in a case where the base sequence is mapped to base sequence data of all genomic DNA except for the HLA alleles.

[0209] The method of the second embodiment mainly differs from the above-described first embodiment in that, in the method of the second embodiment, the candidate base sequence that is mapped to two or more target HLA haplotypes is specified as a target base sequence when the candidate base sequence is mapped to base sequence data of genomic DNA of all HLA haplotypes.

[0210] In the method of the second embodiment, the candidate base sequence, the base sequence data of all genomic DNA of HLA haplotypes, the base sequence data of all genomic DNA, and mapping are the same as those of the above-described first embodiment.

[0211] By the method of the present embodiment, a target base sequence of the gRNA of the second embodiment to be described later can be specified. As will be described later, the gRNA of the second embodiment can cleave multiple target HLA genes (or alleles). Accordingly, it is possible to reduce the types of gRNA required in a case of disrupting or modifying multiple HLA genes. Thereby, costs of producing gRNAs can be reduced. In addition, the risk of off-target mutagenesis can be reduced by reducing the types of gRNA used.

### [GRNA]

### First Embodiment

[0212] In one embodiment, the present invention provides a gRNA targeting, as a target base sequence, a base sequence that is mapped to only one target HLA haplotype in a case where the base sequence is mapped to base sequence data of genomic DNA of all HLA haplotypes, but that is not mapped in a case where the base sequence is mapped to base sequence data of all genomic DNA except for HLA alleles.

[0213] The gRNA of the first embodiment can specifically induce DSB in an HLA haplotype-specific manner, which makes the risk of off-target mutation introduction low.

[0214] In the present embodiment, the gRNA may be a complex of CRISPR RNA (crRNA) and trans-activated CRISPR RNA (tracrRNA), or a single synthetic gRNA (sgRNA) obtained by combining tracrRNA and crRNA. With any structure of gRNA, DSB can be induced in a target base sequence-specific manner.

[0215] A target base sequence is preferably specified by the method described above. As described above, in the present specification, the target base sequence is a base sequence including a PAM sequence. Accordingly, a base sequence obtained by removing the PAM sequence from the target base sequence is used as a spacer base sequence of crRNA or sgRNA.

[0216] In a case where the gRNA of the present embodiment is sgRNA, a base sequence of sgRNA can be the following base sequence.

[0217] First, a base sequence in which the PAM sequence has been removed from the target base sequence is used as a spacer base sequence. Then, a base sequence in which a scaffold sequence is linked to a 3′ end of the spacer base sequence is designed. As the scaffold sequence, for example, a base sequence set forth in SEQ ID NO:39 can be used, but it is not limited thereto.

[0218] The base sequence set forth in SEQ ID NO: 39 may be a base sequence in which one or several bases have been deleted, substituted, or added in the base sequence set forth in SEQ ID NO: 39, as long as the base sequence set forth in SEQ ID NO: 39 functions as a scaffold sequence. One or several bases may be, for example, 1 to 10 bases, for example, 1 to 5 bases, and for example, 1 to 3 bases.

[0219] The designed sgRNA can be prepared by chemical synthesis or the like. The sgRNA may be prepared as RNA and directly introduced into a donor cell, or may be prepared as DNA and incorporated into an expression vector, introduced into a donor cell in the form of the expression vector, and expressed intracellularly.

[0220] In a case where the sgRNA is expressed in cells, a polymerase III promoter such as U6 promoter or H1 promoter can be used. In this case, a base sequence at a 5′ end of the sgRNA may be changed to G or GG in order to improve transcription efficiency. Even in a case where the base sequence at the 5′ end of the sgRNA is changed to G or GG, a cleavage activity of Cas9 is hardly affected.

[0221] For example, in a case where a base sequence from which the PAM sequence is removed from the target base sequence is “5′-NNNNNNNNNNNNNNNNNNNN-3′” (SEQ ID NO: 62), a base sequence of the sgRNA that specifically cleaves the target base sequence is “5′-NNNNNNNNNNNNNNNNNNNNGUUUUAGAGCUAGAAAUAGCAAGUUAAAA UAAGGCUAGUCCGUUAUCAACUUGAAAAAGUGGCACCGAGUCGGUGCUUU UUUU-3′” (SEQ ID NO: 63).

[0222] The gRNA of the present embodiment may be a complex of crRNA and tracrRNA. In addition, the crRNA and tracrRNA may be directly introduced into a donor cell, or may be introduced into a donor cell in the form of an expression vector and expressed in the cell. In a case where the crRNA and tracrRNA are expressed in cells, a polymerase III promoter such as U6 promoter or H1 promoter can be used. In this case, a base sequence at a 5′ end of the crRNA or tracrRNA may be changed to G or GG in order to improve transcription efficiency. Even in a case where the base sequence at the 5′ end of the crRNA or tracrRNA is changed to G or GG, a cleavage activity of Cas9 is hardly affected.

[0223] In a case where the gRNA of the present embodiment is a complex of crRNA and tracrRNA, base sequences of crRNA and tracrRNA can be the following base sequences.

[0224] First, a base sequence in which the PAM sequence has been removed from the target base sequence is used as a spacer base sequence. Then, a base sequence in which a scaffold sequence is linked to a 3′ end of the spacer base sequence is designed to be a base sequence of the crRNA. For example, in a case where a base sequence from which the PAM sequence is removed from the target base sequence is “5′-NNNNNNNNNNNNNNNNNNNN-3′” (SEQ ID NO: 62), a base sequence of the crRNA is “5′-NNNNNNNNNNNNNNNNNNNNGUUUUAGAGCUAUGCUGUUUUG-3′” (SEQ ID NO: 64). In addition, a base sequence of the tracrRNA can be, for example, “5′-CAAAACAGCAUAGCAAGUUAAAAUAAGGCUAGUCCGUUAUCAACUUGAAA AAGUGGCACCGAGUCGGUGC-3′” (SEQ ID NO: 65).

[0225] The base sequence of the crRNA may have a mutation with respect to the base sequence set forth in SEQ ID NO:64 as long as it functions as crRNA. More specifically, it may be a base sequence in which one or several bases are deleted, substituted, or added in the base sequence of SEQ ID NO: 64. One or several bases may be, for example, 1 to 10 bases, for example, 1 to 5 bases, and for example, 1 to 3 bases.

[0226] In addition, the base sequence of the tracrRNA may be a base sequence in which one or several bases are deleted, substituted, or added in the base sequence of SEQ ID NO: 65, as long as it functions as tracrRNA. One or several bases may be, for example, 1 to 10 bases, for example, 1 to 5 bases, and for example, 1 to 3 bases.

[0227] The designed crRNA and tracrRNA can be prepared by chemical synthesis or the like. The crRNA and tracrRNA may be prepared as RNA and directly introduced into a donor cell, or may be prepared as DNA and incorporated into an expression vector, introduced into a donor cell in the form of the expression vector, and expressed intracellularly.

[0228] Specific examples of gRNAs of the first embodiment include a gRNA targeting a base sequence set forth in any of SEQ ID NOs: 3, 4, 7, 45 to 52, and 72 to 2459 as a target base sequence; or a gRNA targeting, as a target base sequence, a base sequence in which one or several bases are deleted, substituted, or added at a 5′ end of a base sequence set forth in any of SEQ ID NOs: 3, 4, 7, 45 to 52, and 72 to 2459. One or several bases may be, for example, 1 to 10 bases, for example, 1 to 5 bases, and for example, 1 to 3 bases. For example, by shortening a 5′ end of a spacer sequence by 2 to 3 bases, a binding ability to DNA can be reduced, and thereby sequence recognition specificity of CRISPR-Cas9 can be increased.

[0229] Among the examples, a gRNA is preferably a gRNA targeting a base sequence set forth in any of SEQ ID NOs: 3, 4, 7, and 45 to 52 as a target base sequence; or a gRNA targeting, as a target base sequence, a base sequence in which one or several bases are deleted, substituted, or added at a 5′ end of a base sequence set forth in any of SEQ ID NOs: 3, 4, 7, and 45 to 52. As will be described later in Examples, gRNAs having these base sequences as a target base sequence disrupts or modifies HLA alleles in an HLA haplotype-specific manner, and thereby it is possible to produce low-antigenic cells in which a rejection reaction in a case where the cells are allogeneically transplanted into a recipient is reduced.

### Second Embodiment

[0230] In one embodiment, the present invention provides a gRNA targeting, as a target base sequence, a base sequence that is mapped to two or more target HLA haplotypes in a case where the base sequence is mapped to base sequence data of genomic DNA of all HLA haplotypes, but that is not mapped in a case where the base sequence is mapped to base sequence data of all genomic DNA except for HLA alleles.

[0231] Specific examples of gRNAs of the second embodiment include a gRNA targeting a base sequence set forth in any of SEQ ID NOs: 53 to 55 and 2460 to 8013 as a target base sequence; or a gRNA targeting, as a target base sequence, a base sequence in which one or several bases are deleted, substituted, or added at a 5′ end of a base sequence set forth in any of SEQ ID NOs: 53 to 55 and 2460 to 8013. One or several bases may be, for example, 1 to 10 bases, for example, 1 to 5 bases, and for example, 1 to 3 bases. For example, by shortening a 5′ end of a spacer sequence by 2 to 3 bases, a binding ability to DNA can be reduced, and thereby sequence recognition specificity of CRISPR-Cas9 can be increased.

[0232] Among the examples, a gRNA is preferably a gRNA targeting a base sequence set forth in any of SEQ ID NOs: 53 to 55 as a target base sequence; or a gRNA targeting, as a target base sequence, a base sequence in which one or several bases are deleted, substituted, or added at a 5′ end of a base sequence set forth in any of SEQ ID NOs: 53 to 55.

[0233] Furthermore, as described above, a base sequence at a 5′ end of the sgRNA may be changed to G or GG in order to improve transcription efficiency from a polymerase III promoter.

[0234] For example, in a case of focusing on the HLA-A allele, the HLA-A allele has two genes, which are an HLA-A gene derived from a father and an HLA-A gene derived from a mother, and the HLA-A genes may be the same as or different from each other in depending on cases. In order to retain an antigen-presenting ability of HLA-A, it is necessary to cleave only one HLA-A gene and induce knockout, and leave the opposite HLA-A gene. Alternatively, in a case where it is desired to induce complete knockout, it is necessary to cleave both HLA-A genes.

[0235] In general, in a case of targeting two genes to CRISPR-gRNA, it is general to design two gRNAs and induce DNA cleavage separately. Accordingly, in a case of knockout of multiple HLA genes, it is possible to use a gRNA specific to each HLA gene.

[0236] As will be described later in Examples, when the inventors of the present invention utilized a feature, in which HLA genes have high DNA sequence homology with each other, to search for a gRNA capable of inducing cleavage of multiple HLA genes with one gRNA (for example, both the father-derived sequence and the mother-derived sequence of the HLA-A gene, or the HLA-A gene and the HLA-B gene), such gRNA sequences could be identified.

[0237] As will be described later in Examples, by using the gRNA of the second embodiment, it is possible to reduce the types of gRNA required in a case of cleaving multiple HLA genes (or alleles). Thereby, costs of producing gRNAs can be reduced. In addition, the risk of off-target mutagenesis can be reduced by reducing the types of gRNA used.

### OTHER EMBODIMENTS

[0238] In one embodiment, the present invention provides an HLA protein expression-inducing agent which includes IFN-γ, IFN-α, IFN-β, IL-4, GM-CSF, TGF-α, or TGF-β as an active ingredient, and which induces HLA protein expression while still maintaining pluripotency of pluripotent stem cells.

[0239] In one embodiment, the present invention provides a method for inducing expression of an HLA protein while still maintaining pluripotency of pluripotent stem cells, the method including a step of adding IFN-γ, IFN-α, IFN-β, IL-4, GM-CSF, TGF-α, or TGF-β in a medium of pluripotent stem cells.

### EXAMPLES

[0240] Next, the present invention will be described in more detail with reference to examples, but the present invention is not limited to the following examples.

### Experimental Example 1

(Design of gRNA)

[0241] It is difficult to design a base sequence of gRNA that cleaves only a specific HLA haplotype because an HLA gene has a large individual difference in sequence and homology between HLA genes is high. Specifically, for example, it was difficult to design a gRNA sequence that recognizes only an HLA-A*01:01 allele and does not recognize other HLA-A alleles, HLA genes other than HLA-A, and other genomic regions.

[0242] Accordingly, a target base sequence of gRNA that recognizes the HLA-A allele, the HLA-B allele, and the HLA-C allele was determined by the following method. First, from the IPD-IMGT/HLA database, an “hla_gen.fasta” file including base sequences of genomic DNA of all HLA haplotypes was downloaded.

[0243] Then, from the base sequences of genomic DNA of all HLA haplotypes, a base sequence corresponding to “NNNNNNNNNNNNNNNNNNNNNGG” (SEQ ID NO:40) was extracted as a candidate of a target base sequence of a gRNA of SpCas9 (sgRNA).

[0244] Then, base sequences of each candidate were mapped to the base sequences of all HLA haplotypes using a Bowtie program, and it was analyzed how many sites and to which HLA gene the base sequences of each candidate were mapped. The same operation can be performed using a sequence homology search program other than the Bowtie program.

[0245] Then, based on results of the Bowtie program, the results were classified into a case in which each sgRNA was bonded to only one of the HLA-A allele, the HLA-B allele or the HLA-C allele, and a case in which each sgRNA was bonded to two or more HLA alleles such as the HLA-A allele and the HLA-B allele, the HLA-A allele and the HLA-C allele, the HLA-B allele and the HLA-C allele, and the HLA-A allele, the HLA-B allele, and the HLA-C allele.

[0246] Then, all candidate base sequences were mapped to a reference human genome sequence (Hg19) using Bowtie, and it was checked whether or not the candidate base sequences were mapped to a genomic region other than the HLA allele. As a result, a candidate base sequence mapped only to the HLA allele was extracted as an intended target base sequence.

[0247] FIG. 1(a) is a Venn diagram showing which of the HLA-A allele, the HLA-B allele, and the HLA-C allele is targeted by a target base sequence extracted in the present experimental example. The numbers in the figure indicate the number of target base sequences of sgRNA. As a result, it was possible to determine a large number of target base sequences of sgRNA targeting only one of the HLA-A allele, the HLA-B allele, or the HLA-C allele, and target base sequences of sgRNA targeting two or more HLA alleles such as the HLA-A allele and the HLA-B allele, the HLA-A allele and the HLA-C allele, the HLA-B allele and the HLA-C allele, the HLA-A allele, the HLA-B allele, and the HLA-C allele.

[0248] FIG. 1(b) is a diagram showing which sites of an HLA-A allele, an HLA-B allele, and an HLA-C allele a target base sequence of an sgRNA identified in the present experimental example targets. In FIG. 1(b), boxes connected by lines indicate exons of each HLA gene, and the HLA-A allele has an exon 1 on the left side, and the HLA-B allele and the HLA-C allele have an exon 1 on the right side. In addition, the term “[+] strand sgRNAs” indicates target base sequences targeting plus-strand DNA, the term “[−] strand sgRNAs” indicates target base sequences targeting minus-strand DNA, and the term “Unique k-mers” indicates a set of 10 to 16 mer base sequences (also referred to as “k-mer sequences”) that is present only at one site on the human genome.

[0249] As a result, it was revealed that a large number of sgRNA target sequences could be found at a site at which a peak of unique k-mers was high. A considerable number of target base sequences could be found in both the plus-strand DNA and the minus-strand DNA.

[0250] On SEQ ID NOs: 3, 4, 7, 45 to 52, and 72 to 2459, a base sequence is shown, which is extracted as a base sequence that is mapped to only one target HLA haplotype in a case where the base sequence is mapped to base sequence data of genomic DNA of all HLA haplotypes, but that is not mapped in a case where the base sequence is mapped to base sequence data of all genomic DNA except for HLA alleles. In addition, Table 1 shows, as an example, the number of target HLA alleles and target HLA alleles for some base sequences.

TABLE 1

| SEQ ID | Number of target | |
|---|---|---|
| NO. | HLA alleles | Target HLA alleles |
| 72 | 1 | A*11:01:01:02 |
| 73 | 1 | A*11:05 |
| 74 | 1 | A*11:01:01:02 |
| 75 | 1 | A*02:43N |
| 76 | 1 | B*73:01 |

[0251] In addition, on SEQ ID NOs: 53 to 55 and 2460 to 8013, a base sequence is shown, which is extracted as a base sequence that is mapped to two or more target HLA haplotypes in a case where the base sequence is mapped to base sequence data of genomic DNA of all HLA haplotypes, but that is not mapped in a case where the base sequence is mapped to base sequence data of all genomic DNA except for HLA alleles. In addition, Table 2 shows, as an example, the number of target HILA alleles and target HLA alleles for some base sequences.

TABLE 2

| SEQ | Number of | |
|---|---|---|
| ID | target HLA | |
| NO. | alleles | Target HLA alleles |
| 2460 | 44 | A*02:01:01:01, A*02:01:01:02L, A*02:01:01:03, |
| | | A*02:01:01:04, A*02:01:01:05, A*02:01:01:06, |
| | | A*02:01:120, A*02:01:121, A*02:02:01:01, |
| | | A*02:02:01:02, A*02:03:01, A*02:03:03, |
| | | A*02:05:01, A*02:06:01:01, A*02:06:01:02, |
| | | A*02:06:01:03, A*02:06:22, A*02:07:01, |
| | | A*02:10, A*02:193, A*02:251, A*02:259, |
| | | A*02:264, A*02:265, A*02:266, A*02:269, |
| | | A*02:279, A*02:32N. A*02:376, A*02:43N, |
| | | A*02:455, A*02:48, A*02:51, A*02:533, |
| | | A*02:53N, A*02:602, A*02:603, A*02:60:01, |
| | | A*02:68, A*02:77, A*02:81, A*02:89, A*02:95, |
| | | A*69:01 |
| 2461 | 2 | A*80:01:01:01, A*80:01:01:02 |
| 2462 | 138 | A*01:01:01:01, A*01:01:01:02N, A*01:01:38L, |
| | | A*01:01:71, A*01:01:73, A*01:02, A*01:03, |
| | | A*01:04N, A*01:09, A*01:11N, A*01:14, |
| | | A*01:16N, A*01:194, A*01:20, A*02:57, |
| | | A*02:65, A*03:01:01:01, A*03:01:01:02N, |
| | | A*03:01:01:03, A*03:01:01:04, A*03:01:01:05, |
| | | A*03:01:01:06, A*03:02:01, A*03:11N, |
| | | A*03:213, A*03:218, A*03:21N, A*03:224, |
| | | A*03:231, A*03:234Q, A*03:36N, A*03:89:02, |
| | | A*11:01:01:01, A*11:01:18, A*11:02:01, |
| | | A*11:05, A*11:110, A*11:183, A*11:190, |
| | | A*11:210N, A*11:25:01, A*11:50Q, A*11:60, |
| | | A*11:69N, A*11:74, A*11:75, A*11:77, |
| | | A*23:01:01, A*23:09, A*23:17, A*23:19N, |
| | | A*23:38N, A*24:02:01:01, A*24:02:01:02L, |
| | | A*24:02:01:03, A*24:02:01:04, A*24:02:01:05, |
| | | A*24:02:03Q, A*24:02:10, A*24:03:01, |
| | | A*24:07:01, A*24:08, A*24:09N, A*24:10:01, |
| | | A*24:11N, A*24:152, A*24:20, A*24:215, |
| | | A*24:252N, A*24:293, A*24:56, A*24:61, |
| | | A*24:86N, A*25:01:01, A*26:01:01:01, |
| | | A*26:01:01:02, A*26:01:39, A*26:04, |
| | | A*26:07:02, A*26:107N, A*26:115, A*26:11N, |
| | | A*26:15, A*26:50, A*29:01:01:01, |
| | | A*29:01:01:02N, A*29:02:01:01, A*29:02:01:02, |
| | | A*29:02:01:03, A*29:02:17, A*29:03, A*29:46, |
| | | A*31:01:02:01, A*31:01:02:02, A*31:01:02:03N, |
| | | A*31:01:04, A*31:01:23, A*31:01:24, A*31:04, |
| | | A*31:14N, A*31:36, A*31:46, A*32:01:01, |
| | | A*32:06, A*32:69, A*33:01:01, A*33:03:01, |
| | | A*33:07, A*34:01:01, A*34:02:01, A*34:14, |
| | | A*36:01, A*43:01, A*66:01:01, A*66:17, |
| | | A*68:01:01:01, A*68:01:01:02., A*68:01:02:01, |
| | | A*68:01:02:02, A*68:01:02:03, A*68:02:01:01, |
| | | A*68:02:01:02, A*68:02:01:03, A*68:02:02, |
| | | A*68:03:01, A*68:07, A*68:08:01, A*68:139, |
| | | A*68:140, A*68:17, A*68:18N, A*68:22, |
| | | A*68:71, A*74:01:01, A*74:01:02, A*74:01:03, |
| | | A*74:02:01:01, A*74:02:01:02 |
| 2463 | 2 | A*80:01:01:01, A*80:01:01:02 |
| 2464 | 7 | A*30:01:01, A*30:01:11, A*30:02:01:01, |
| | | A*30:02:01:02, A*30:02:01:03, A*30:04:01, |
| | | A*30:89 |

[0252] Furthermore, Table 3 shows the number of target HLA alleles and the number of extracted target base sequences, regarding a base sequence extracted as a base sequence that is mapped to two or more target HLA haplotypes in a case where the base sequence is mapped to base sequence data of genomic DNA of all HLA haplotypes, but that is not mapped in a case where the base sequence is mapped to base sequence data of all genomic DNA except for HLA alleles.

TABLE 3

| Number of target | Number of target |
|---|---|
| HLA alleles | base sequences |
| 2 | 378 |
| 3 | 115 |
| 4 | 88 |
| 5~10 | 537 |
| 11~100 | 2604 |
| 101~200 | 926 |
| 201~300 | 547 |
| 301~400 | 173 |
| 401~500 | 65 |
| 501 or more | 121 |

### Experimental Example 2

### (Induction 1 of HLA Protein Expression by Stimulation of iPS Cells)

[0253] An attempt was made to stimulate undifferentiated iPS cells to induce HLA protein expression. Specifically, 100 ng/ml of lipopolysaccharide (LPS), 100 ng/ml of TNF-α, or 50 ng/ml of IFN-γ was added to a medium of iPS cells and treated for 48 hours. Thereafter, flow cytometric analysis was performed using an anti-HLA-ABC antibody (product number: 311418, BIOLEGEND) to examine expression of HLA protein.

[0254] FIG. 2 is a graph showing results of flow cytometry. As a result, it was revealed that the addition of IFN-γ increased the expression of HLA protein.

### Experimental Example 3

### (Induction 2 of HLA Protein Expression by Stimulation of iPS Cells)

[0255] 10 ng/mL, 50 ng/mL, or 100 ng/ml of IFN-γ was added to a medium of iPS cells and treated for 48 hours. Thereafter, flow cytometric analysis was performed using an anti-HLA-ABC antibody (product number: 311418, BIOLEGEND) to examine expression of HLA protein.

[0256] FIG. 3 is a graph showing results of flow cytometry. As a result, it was revealed that the addition of IFN-γ increased the expression of HLA protein. As a result, it was revealed that the addition of any concentration of IFN-γ increased the expression of HLA protein.

### Experimental Example 4

### (Induction 3 of HLA Protein Expression by Stimulation of iPS Cells)

[0257] 50 ng/mL of IFN-γ was added to a medium of iPS cells and treated for 4 hours, 8 hours, 16 hours, 24 hours, and 48 hours. Thereafter, flow cytometric analysis was performed using anti-HLA-A2 antibody (product number: 740082, BD) to examine expression of HLA-A2 protein.

[0258] FIG. 4(a) is a graph showing results of flow cytometry. In addition, FIG. 4(b) is a diagram showing a schedule for an IFN-γ treatment of iPS cells and analysis of an expression level of an HLA-A protein. As a result, it was revealed that the longer the IFN-γ treatment time, the higher the expression of HLA protein. Furthermore, as a result of further examination, it was revealed that after the iPS cells were treated with IFN-γ for 48 hours, the expression of HLA protein was maintained even 7 days after removal of IFN-γ from the medium.

### Experimental Example 5

### (Determination of HLA Haplotype of Cells)

[0259] An HLA haplotype of each cell (a pair of each HLA allele inherited from parents) was determined by the following method.

[0260] First, a FASTQ sequence file was created for each of 604B1 iPS cells and 1383D2 iPS cells based on Whole Exome Sequencing (WES) analysis results of the 604B1 iPS cells and Whole Genome Sequencing (WGS) analysis results of the 1383D2 iPS cells.

[0261] Subsequently, each FASTQ sequence file was mapped to a reference human genome sequence (Hg19) to create a BAM file. Subsequently, each of the above-described BAM files was analyzed using software (name “HLA-genotyper,”) to determine an HLA haplotype of each cell.

[0262] In addition, for 585A1 iPS cells, extracted genomic DNA was sent to HLA Research Institute, and an HLA haplotype was determined by a fluorescent bead method (PCR-rSSO/Luminex method). Furthermore, for 604B1 iPS cells, an HLA haplotype was determined in the same manner as for 585A1 iPS cells.

[0263] Furthermore, regarding peripheral blood mononuclear cells (PBMC), cells for which HLA haplotype information was provided by the vendors (CTL, Wako) were used.

### Experimental Example 6

(Examination on Genomic Cleavage Activity of sgRNA)

[0264] Among the sgRNAs targeting the target base sequence specified in Experimental Example 1, A0207-ex3-g1 (where a target base sequence is shown in SEQ ID NO: 3), A0207-ex3-g2 (where a target base sequence is shown in SEQ ID NO: 4), and A0207-ex3-g4 (where a target base sequence is shown in SEQ ID NO: 7), which were sgRNAs which cleaved only an A*02:07 allele and of which base sequences did not match an A*32:01 allele, were selected.

[0265] A base sequence of each sgRNA used in each of the following experimental examples was a base sequence in which a scaffold sequence set forth in SEQ ID NO:39 was linked to a 3′ side of a base sequence from which a PAM sequence was removed from a target base sequence of each sgRNA. For example, in a case where a base sequence from which a PAM sequence was removed from a target base sequence was “5′-NNNNNNNNNNNNNNNNNNNN-3′” (SEQ ID NO:62), a base sequence of an sgRNA used was “5′-NNNNNNNNNNNNNNNNNNNNGUUUUAGAGCUAGAAAUAGCAAGUUAAAA UAAGGCUAGUCCGUUAUCAACUUGAAAAAGUGGCACCGAGUCGGUGCUUU UUUU-3′” (SEQ ID NO:63). Furthermore, in each of the following experimental examples, each sgRNA was introduced into a cell in the form of an expression vector and expressed in the cell to be used.

[0266] FIG. 5(a) is a diagram showing target bases and target sites of sgRNAs found in an exon 3 region of HLA-A. In FIG. 5(a), a box indicates an exon of an HLA-A*02:07 gene, and an arrow indicates a position of a target base sequence of each sgRNA. Furthermore, FIG. 5(a) also shows a base sequence of a wild type A*02:07 allele and a base sequence of a wild type A*32:01 allele. Portions of both alleles at which sequences differ are shown with capital letters, and a PAM sequence of sgRNA is shown with an underline.

[0267] Subsequently, A0207-ex3-g1, A0207-ex3-g2, and A0207-ex3-g4 were each transfected together with purified Cas9 protein into 1383D2 iPS cells having an HLA haplotype of Table 4. The transfection was carried out using a commercially available kit (model “CRISPR-MAX,” product number: CMAX00003, Thermo Fisher Scientific).

TABLE 4
HLA haplotype of 1383D2 iPS cell

| | HLA-A | | HLA-B | | HLA-C | |
|---|---|---|---|---|---|---|
| HLA | A*02:07 | A*32:01 | B*15:02 | B*51:01 | C*08:01 | C*14:02 |
| allele | | | | | | |

[0268] Then, after extracting genomic DNA, gene mutation introduction efficiency in each cell was examined by T7 endonuclease I (T7EI) assay. The T7EI assay was performed as follows.

[0269] First, Nested PCR was performed using a primer that specifically amplifies the A*02:07 allele of the HLA-A2 region. Primers shown in Table 5 were used for Nested PCR.

TABLE 5

| | | |
|---|---|---|
| | | SEQ |
| | | ID |
| Primer name | Base sequence | NO. |

Primers for 1st PCR

| | | |
|---|---|---|
| 1383D2-HLA-A-be-ex1-fwd | TTGGGGATTCCCCAACTCC | 41 |
| HLA-A-in7-rev | GTCCACTGTTCCGCCCAA | 42 |

Primers for 2nd PCR

| | | |
|---|---|---|
| HLA-A0207-ex2-fwd | GGTCCGGAGTATTGGGACGG | 43 |
| HLA-A0207-ex3-rev | TCTCAACTGCTCCGCCACAT | 44 |

[0270] Then, a PCR product was purified, and 1/10 volume of 10×NEBuffer2 (NEB) buffer was added to the purified PCR product (400 ng) and heated at 95° C. for 5 minutes to heat-modify double-stranded DNA. Thereafter, re-annealing was performed by gradually lowering the temperature. More specifically, cooling was performed from 95° C. to 85° C. at −2° C./sec, and from 85° C. to 25° C. at −0.1° C./sec.

[0271] Then, 10 units of T7 endonuclease I (T7EI, Cat. No. M0302S, NEB) was added to the PCR product after reannealing and treated at 37° C. for 15 minutes. Subsequently, activity of T7EI was stopped by adding a 0.25 M EDTA solution at 1/10 volume of the reaction solution, and then a sample was maintained at a low temperature (on ice).

[0272] Subsequently, the T7EI-treated PCR product was subjected to 2% agarose gel electrophoresis, and DNA signal intensities of a cleaved band and an uncut band were quantified with ImageJ software.

[0273] FIG. 5(b) shows the results of analysis of the genomic DNA mutation introduction efficiency in a case where each sgRNA was used by the T7EI assay. In FIG. 5(b), “T7EI” indicates T7 endonuclease I, “−” indicates that no addition was performed, and “+” indicates that addition was performed. Furthermore, “ex3-g1” indicates a result of introducing A0207-ex3-g1, “ex3-g2” indicates a result of introducing A0207-ex3-g2, and “ex3-g4” indicates a result of introducing A0207-ex3-g4, and “DMD #1” indicates a result of introducing an sgRNA specific to a dystrophin gene, which was used as a positive control. Furthermore, an arrowhead indicates a band cleaved by T7EI.

[0274] As a result, it was revealed that A0207-ex3-g4 sgRNA has the highest genome cleavage activity.

### Experimental Example 7

### (HLA-Allele-Specific Knockout 1)

### <<Confirmation of HLA Protein Expression>>

[0275] In order to confirm the expression of HLA on a cell surface, two iPS cell strains having HLA serotype A2 (1383D2 strain and 404C2 strain) were selected. Furthermore, a 604B1 strain was selected as an iPS cell strain not having the HLA serotype A2. Regarding undifferentiated iPS cells of a total of three strains, for in a case where the cells were treated with cytokine and a case where the cells were treated with 50 ng/mL of IFN-γ for 48 hours, the cells were stained using an anti-HLA-A2 antibody (product number: 740082, BD), and flow cytometric analysis was performed thereon.

[0276] FIG. 6(a) is a graph showing results of flow cytometric analysis. As a result, by IFN-γ treatment, specific expression of HLA-A2 was confirmed in the 1383D2 cells and the 404C2 cells.

### <<HLA-Allele-Specific Knockout>>

[0277] Subsequently, A0207-ex3-g1 (where a target base sequence is shown in SEQ ID NO: 3), A0207-ex3-g2 (where a target base sequence is shown in SEQ ID NO: 4), and A0207-ex3-g4 (where a target base sequence is shown in SEQ ID NO: 7), which were the above-described sgRNAs, were respectively transfected into 1383D2 iPS cells together with a purified Cas9 protein. The transfection was carried out using a commercially available kit (model “CRISPR-MAX,” product number: CMAX00003, Thermo Fisher Scientific).

[0278] In addition, as a control sgRNA that does not disrupt an HLA gene, sgRNA-DMD #1 (where a target base sequence is shown in SEQ ID NO: 61) targeting a dystrophin (DMD) gene on the X chromosome was used.

[0279] Subsequently, each transfected iPS cell was passaged in 2 wells, one well kept untreated with cytokines and the other well was treated with 50 ng/ml of IFN-γ added to a medium for 48 hours. Thereafter, flow cytometric analysis was performed on the cells using an anti-HLA-A2 antibody (product number: 740082, BD).

[0280] FIG. 6(b) is a graph showing results of flow cytometric analysis. As a result, it was revealed that, in a case where A0207-ex3-g4 sgRNA targeting the highest genome cleaving activity was used, the cells in which the largest number of an HLA-A2 antigen was disrupted appeared.

<<Analysis of Base Sequence of Target Site of sgRNA>>

[0281] Then, genomic DNA was extracted from 1383D2 iPS cells into which sgRNA (A0207-ex3-g4) had been introduced, and using a primer specifically amplifying the A*02:07 allele and not amplifying the A*32:01 allele, Nested PCR was performed to amplify a target site of sgRNA. Primers shown in Table 6 were used for Nested PCR.

TABLE 6

| | | |
|---|---|---|
| | | SEQ |
| | | ID |
| Primer name | Base sequence | NO. |

Primers for 1st PCR

| | | |
|---|---|---|
| 1383D2-HLA-A-be-ex1-fwd | TTGGGGATTCCCCAACTCC | 41 |
| HLA-A-in7-rev | GTCCACTGTTCCGCCCAA | 42 |

Primers for 2nd PCR

| | | |
|---|---|---|
| HLA-A0207-ex2-fwd | GGTCCGGAGTATTGGGACGG | 43 |
| HLA-A0207-ex3-rev | TCTCAACTGCTCCGCCACAT | 44 |

[0282] Then, a PCR product was cloned by TA cloning into a pGEM-T-Easy vector (Promega). Subsequently, 21 strains of Escherichia coli colonies were recovered, and a base sequence was determined by Sanger sequence. As a result, it was revealed that 11 strains had a wild-type base sequence, but 10 strains (4 strains of deletion and 6 strains of insertion) had some insertion deletion mutation (Indel mutation).

[0283] In addition, 1383D2 iPS cells to which sgRNA (A0207-ex3-g4) was introduced were stained with an anti-HLA-A2 antibody (product number: 740082, BD), and cells in which an HLA-A2 antigen became negative were sorted by a flow cytometer. Genomic DNA was extracted from the sorted iPS cells, and Nested PCR was performed using each of the primers (described above) that specifically amplify the A*02:07 allele which was the target allele. In addition, Nested PCR was performed using each of primers that specifically amplify the A*32:01 allele which was not the target. Primers shown in Table 7 were used for Nested PCR of the A*32:01 allele.

TABLE 7

| | | |
|---|---|---|
| | | SEQ |
| | | ID |
| Primer name | Base sequence | NO. |

Primers for 1st PCR

| | | |
|---|---|---|
| 1383D2-HLA-A-be-ex1-fwd | TTGGGGATTCCCCAACTCC | 41 |
| HLA-A-in7-rev | GTCCACTGTTCCGCCCAA | 42 |

Primers for 2nd PCR

| | | |
|---|---|---|
| HLA-A3201-ex2-fwd | GGGCCGGAGTATTGGGACCA | 70 |
| HLA-A3201-ex3-rev | CTCAACTGCTCCGCCACAT | 71 |

[0284] Then, a PCR product was cloned by TA cloning into a pGEM-T-Easy vector (Promega). Escherichia coli colonies were recovered from 16 strains (A*02:07 allele) and 19 strains (A*32:01 allele), and base sequences were determined by Sanger sequence. Then, based on the determined base sequence, the number of clones with a deletion in the sequence, the number of clones with insertion, and the number of clones without sequence change were counted.

[0285] As a result, the A*02:07 allele had some insertion deletion mutation (Indel mutation) in all subclones of the 16 strains. On the other hand, the A*32:01 allele was confirmed to be a wild-type base sequence in all subclones of the 19 strains.

[0286] FIG. 7 shows a graph showing genomic DNA mutation introduction efficiency in a case where sorting by HLA-A2 antigen expression was not performed and in a case where sorting a cell group in which HLA-A2 antigen expression was negative was performed, after introducing sgRNA into the iPS cell 1383D2 strain to induce genome editing.

[0287] As a result, it was revealed that proportion of cells in which the A*02:07 target allele was genome-edited was increased by sorting HLA antigen-negative cells. In addition, it was also confirmed that no mutation was introduced into the HLA-A*32:01 allele, which is a non-target allele.

### Experimental Example 8

### (HLA-Allele-Specific Knockout 2)

[0288] By disrupting the HLA allele of 604B1 iPS cells having the HLA haplotype shown in Table 8, low-antigenic cells were produced in which a rejection reaction was reduced in a case where the cells were allogeneically transplanted into a recipient A having a hypothetical HLA haplotype shown in Table 9. HLA haplotypes shown in Table 9 are HLA haplotypes of peripheral blood mononuclear cells (PBMC, type “LP_194,” CTL).

[0289] As shown in Table 8 and Table 9, 604B1 iPS cells have A*01:01 and B*07:02 alleles. In addition, these HLA alleles are not present in the recipient A. Accordingly, in a case where the 604B1 iPS cells or cells differentiation-induced from the 604B1 iPS cells are transplanted into a recipient, T cells of the recipient A attack the cells and immune rejection occurs.

[0290] For this reason, in order to reduce a rejection reaction, the HLA alleles that are present in the donor cells but not present in the recipient A, that is, the A*01:01 allele and the B*07:02 allele, are disrupted such that cells do not express an HLA protein specific to donor cells.

TABLE 8
HLA haplotype of 604B1 iPS cell

| HLA-A | | HLA-B | | HLA-C | |
|---|---|---|---|---|---|
| A*01:01 | A*24:02 | B*07:02 | B*37:01 | C*06:02 | C*07:02 |

TABLE 9
HLA haplotype of virtual recipient A (PBMC “LP_194,” CTL)

| HLA-A | | HLA-B | | HLA-C | |
|---|---|---|---|---|---|
| A*24:02 | A*24:02 | B*37:01 | B*39:06 | C*06:02 | C*07:02 |

[0291] From among the sgRNAs identified in Experimental Example 1, two sgRNAs (A0101-ex3-g1 (where a target base sequence is set forth in SEQ ID NO: 45) and A0101-ex3-g2 (where a target base sequence is set forth in SEQ ID NO: 46)) which cleave only the A*01:01 allele and of which base sequences do not match the A*24:02 allele; two sgRNAs (B0702-ex2-g1 (where a target base sequence is set forth in SEQ ID NO: 47) and B0702-ex2-g2 (where a target base sequence is set forth in SEQ ID NO: 48)) which cleave only the B*07:02 allele and of which sequences do not match the B*37:01 allele were selected.

[0292] Then, each of the above sgRNAs was synthesized by an in vitro transcription reaction, and each was transfected into 604B1 iPS cells together with a purified Cas9 protein. The transfection was carried out using a commercially available kit (model “CRISPR-MAX,” product number: CMAX00003, Thermo Fisher Scientific).

[0293] When the A*01:01 allele or the B*07:02 allele was cleaved by the introduction of sgRNA and a gene mutation occurred in the process of repairing it, the A*01:01 allele or the B*07:02 allele was knocked out, and thereby cells in which an HLA-A1 protein or an HLA-B7 protein was deficient were obtained.

[0294] Subsequently, each iPS cell was stimulated with 50 ng/mL of IFN-γ for 48 hours to induce the expression of HLA protein. Subsequently, each iPS cell was stained with an anti-HLA-A1 antibody (type “ab33883,” abcam) or an anti-HLA-B7 antibody (type “MCA986,” Bio-Rad), and a percentage of HLA protein-negative cells was analyzed by flow cytometry.

[0295] FIG. 8(a) and FIG. 8(b) are graphs showing results of flow cytometric analysis. FIG. 8(a) shows the results of measuring an expression level of the HLA-A1 protein in the iPS cells in which the A*01:01 allele was disrupted, and FIG. 8(b) shows the results of measuring an expression level of the HLA-B7 protein in the iPS cells in which the B*07:02 allele was disrupted. In FIGS. 8(a) and 8(b), “No transfection” indicates the results of the iPS cells into which an sgRNA was not introduced.

[0296] As a result, it was revealed that 11.2% of cells were deficient in the HLA-A1 protein in a case where A0101-ex3-g1 (where a target base sequence is set forth in SEQ ID NO: 45) was used as sgRNA. In addition, it was revealed that 18.9% of the cells were deficient in the HLA-A1 protein in a case where A0101-ex3-g2 (where a target base sequence is set forth in SEQ ID NO: 46) was used as an sgRNA. Based on these results, it was revealed that A0101-ex3-g2 was an sgRNA targeting a higher knockout efficiency.

[0297] Furthermore, it was revealed that 11.6% of cells were deficient in the HLA-B7 protein in a case where B0702-ex2-g1 (where a target base sequence is set forth in SEQ ID NO: 47) was used as sgRNA. Furthermore, it was revealed that 0.7% of cells were deficient in the HLA-B7 protein in a case where B0702-ex2-g2 (where a target base sequence is set forth in SEQ ID NO: 48) was used as sgRNA. Based on these results, it was revealed that B0702-ex2-g1 was an sgRNA targeting a higher knockout efficiency.

[0298] Based on these results, A0101-ex3-g2 and B0702-ex2-g1 which had high knockout efficiency were selected, and both A*01:01 allele and B*07:02 allele were knocked out. Specifically, 604B1 iPS cells were transfected with the selected two kinds of sgRNA together with a purified Cas9 protein. The transfection was carried out using a commercially available kit (model “CRISPR-MAX,” product number: CMAX00003, Thermo Fisher Scientific).

[0299] Subsequently, iPS cells were stimulated with 50 ng/ml of IFN-γ for 48 hours to induce the expression of HLA protein. Subsequently, iPS cells were stained with an anti-HLA-A1 antibody (type “ab33883,” abcam) and an anti-HLA-B7 antibody (type “MCA986,” Bio-Rad), and analysis was performed by flow cytometry.

[0300] FIG. 9(a) and FIG. 9(b) are graphs showing results of flow cytometric analysis. In FIG. 9(a), “No transfection” indicates the analysis results of the iPS cells into which an sgRNA was not introduced. In addition, in FIG. 9(b), “A0101-ex3-g2” and “B0702-ex2-g1” indicate the analysis results of iPS cells into which these two sgRNAs were co-introduced and both the A*01:01 allele and the B*07:02 allele were knocked out.

[0301] In addition, single cell sorting was performed from a cell population in which both HLA-A1 protein and HLA-B7 protein were negative, and subclones of 15 strains were recovered. Subsequently, genomic DNA was extracted from each subclone. Then, a PCR reaction for amplifying a region containing a target site (exon 3) of A0101-ex3-g2, which is the sgRNA used and a region containing a target site (exon 2) of B0702-ex2-g1 was performed. Thereafter, a base sequence was analyzed by Sanger sequence.

[0302] FIG. 10(a) is a table showing a base mutation pattern of each clone recovered. In FIG. 10(a), “WT” indicates that it was a wild-type base sequence, “−” indicates that it had a deletion mutation, and “+” indicates that it had an insertion mutation. For example, “−5 bp” indicates that it has a deletion of 5 bases, and “+18 bp” indicates that it has an insertion of 18 bases. In FIG. 10(b), base sequences of two strains (#8 and #10) are shown as a representative example.

[0303] As a result, it was revealed that some insertion deletion mutation (Indel mutation) occurred in both A*01:01 allele and B*07:02 allele in clones of 11 strains out of 15 strains. From the clones of 11 strains in which Indel mutation occurred, two strains in which frameshift mutation occurred (#8 and #10) were selected and used in the following experiments.

### Experimental Example 9

### (HLA-Allele-Specific Knockout 3)

[0304] By disrupting the HLA allele of 585A1 iPS cells having the HLA haplotype shown in Table 10, low-antigenic cells were produced in which a rejection reaction was reduced in a case where the cells were allogeneically transplanted into a recipient B having a hypothetical HLA haplotype shown in Table 11. HLA haplotypes shown in Table 11 are HLA haplotypes of peripheral blood mononuclear cells (PBMC, type “2010113203,” Wako).

[0305] As shown in Table 10 and Table 11, the 585A1 iPS cells had the B*07:02 allele and the C*07:02 allele. In addition, these HLA alleles are not present in the recipient B. Accordingly, in a case where the 585A1 iPS cells or cells differentiation-induced from the 585A1 iPS cells are transplanted into a recipient, T cells of the recipient B attack the cells and immune rejection occurs.

[0306] For this reason, in order to reduce a rejection reaction, the HLA alleles that are present in the donor cells but not present in the recipient B, that is, the B*07:02 allele and the C*07:02 allele, are disrupted such that cells do not express an HLA protein specific to donor cells.

TABLE 10
HLA haplotype of 585A1 iPS cell

| HLA-A | | HLA-B | | HLA-C | |
|---|---|---|---|---|---|
| A*24:02 | A*24:02 | B*07:02 | B*52:01 | C*07:02 | C*12:02 |

TABLE 11
HLA haplotype of virtual recipient B (PBMC “2010113203,” Wako)

| HLA-A | | HLA-B | | HLA-C | |
|---|---|---|---|---|---|
| A*24:02 | A*24:02 | B*40:06 | B*52:01 | C*08:01 | C*12:02 |

[0307] As sgRNA, B0702-ex2-g1 (where a target base sequence is set forth in SEQ ID NO: 47) specific to the B*07:02 allele, and C0702-ex3-g3 (where a target base sequence is set forth in SEQ ID NO: 49) specific to the C*07:02 allele were used. In addition, both the B*07:02 allele and C*07:02 allele of the 585A1 iPS cells were knocked out in the same manner as in Experimental Example 7 except that a commercially available kit (trade name “4D-Nucleofector,” model “V4XP-4032,” Lonza) was used for transfection.

[0308] Subsequently, iPS cells were stimulated with 50 ng/ml of IFN-γ for 48 hours to induce the expression of HLA protein. Subsequently, iPS cells were stained with an anti-HLA-B7 antibody (type “MCA986,” Bio-Rad), and analysis was performed by flow cytometry.

[0309] FIG. 11 is a graph showing results of flow cytometric analysis. In FIG. 11, “No stain” indicates the analysis results of iPS cells that were not stained with an antibody, “No transfection” indicates the analysis results of iPS cells into which sgRNA was not introduced, and “B0702-ex2-g1” and “C0702-ex3-g3” indicate the analysis results of iPS cells in which both B*07:02 allele and C*07:02 allele were knocked out by introducing these sgRNAs into the cells.

[0310] In addition, single cell sorting was performed from a cell population in which an HLA-B7 protein was negative, and subclones of 28 strains were recovered. Subsequently, genomic DNA was extracted from each subclone. Then, a PCR reaction for amplifying a region containing a target site (exon 2) of B0702-ex2-g1, which is the sgRNA used and a region containing a target site (exon 3) of C0702-ex3-g3 was performed. Thereafter, a base sequence was analyzed by Sanger sequence.

[0311] FIG. 12 is a table showing a base mutation pattern of each clone recovered. In FIG. 12(a), “WT” indicates that it was a wild-type base sequence, “−” indicates that it had a deletion mutation, and “+” indicates that it had an insertion mutation. In FIG. 12(b), base sequences of three strains (#2, #11, and #26) are shown as a representative example.

[0312] As a result, it was revealed that some insertion deletion mutation (Indel mutation) occurred in both B*07:02 allele and C*07:02 allele in multiple clones. Three strains (#2, #11, and #26) were selected from the clones in which the Indel mutation had occurred and used in the following experiment.

### Experimental Example 10

### (HLA-Allele-Specific Knockout 4)

[0313] By disrupting the HLA allele of 585A1 iPS cells having the HLA haplotype shown in Table 12, low-antigenic cells were produced in which a rejection reaction was reduced in a case where the cells were allogeneically transplanted into a recipient C having a hypothetical HLA haplotype shown in Table 13. HLA haplotypes shown in Table 13 are HLA haplotypes of peripheral blood mononuclear cells (PBMC, type “LP_266,” CTL).

[0314] As shown in Tables 12 and 13, the 585A1 iPS cells had the B*52:01 allele and the C*12:02 allele. In addition, these HLA alleles are not present in the recipient C. Accordingly, in a case where the 585A1 iPS cells or cells differentiation-induced from the 585A1 iPS cells are transplanted into the recipient C, T cells of the recipient C attack the cells and immune rejection occurs.

[0315] For this reason, in order to reduce a rejection reaction, the HLA alleles that are present in the donor cells but not present in the recipient C, that is, the B*52:01 allele and the C*12:02 allele, are disrupted such that cells do not express an HLA protein specific to donor cells.

TABLE 12
HLA haplotype of 585A1 iPS cell

| HLA-A | | HLA-B | | HLA-C | |
|---|---|---|---|---|---|
| A*24:02 | A*24:02 | B*07:02 | B*52:01 | C*07:02 | C*12:02 |

TABLE 13
HLA haplotype of virtual recipient C (PBMC “LP_266,” CTL)

| HLA-A | | HLA-B | | HLA-C | |
|---|---|---|---|---|---|
| A*03:01 | A*24:02 | B*07:02 | B*40:02 | C*03:05 | C*07:02 |

[0316] The C*12:02 allele in the 585A1 iPS cells was knocked out in the same manner as in Experimental Example 9 except that C1202-ex3-g1 (where a target base sequence is set forth in SEQ ID NO: 50), which was specific to the C*12:02 allele, was used as sgRNA, and that cell sorting was not performed. Thereby, subclones of 17 strains were obtained. The cells were not sorted because the anti-HLA-C12 allele-specific antibody was not available.

[0317] Subsequently, genomic DNA was extracted from each subclone. Then, a PCR reaction for amplifying a region containing a target site (exon 3) of C1202-ex3-g1, which was sgRNA used, was performed. Thereafter, a base sequence was analyzed by Sanger sequence.

[0318] FIG. 13(a) is a table showing a base mutation pattern of each clone recovered. In FIG. 13(a), “−” indicates that it had a deletion mutation, and “+” indicates that it had an insertion mutation. As a result, it was revealed that some insertion deletion mutation (Indel mutation) occurred near the target site of sgRNA. From among the clones in which the Indel mutation had occurred, #1 cells having frameshift mutation were selected.

[0319] Then, B5201-ex3-g2 (where a target base sequence is set forth in SEQ ID NO: 51) specific to the B*52:01 allele was introduced, as sgRNA, into the #1 cells in which the C*12:02 allele was knocked out so that the B*52:01 allele was knocked out. Thereby, subclones of 12 strains (clones #1-1 to #1-12) were obtained. The cells were not sorted because the anti-HLA-B52 allele-specific antibody was not available.

[0320] Subsequently, genomic DNA was extracted from each subclone. Then, a PCR reaction for amplifying a region containing a target site (exon 3) of B5201-ex3-g2, which was sgRNA used, was performed. Thereafter, a base sequence was analyzed by Sanger sequence.

[0321] FIG. 13(b) is a table showing a base mutation pattern of each clone recovered. In FIG. 13(b), “Mut” indicates that it had a substitution mutation, “WT” indicates that it was a wild-type base sequence, and “−” had a deletion mutation. As a result, it was revealed that some mutation occurred near the target site of sgRNA. FIG. 13(c) shows a base sequence of a strain #1-1 as a representative example.

### Experimental Example 11

### (HLA-Allele-Specific Knockout 5)

[0322] By disrupting the HLA allele of 604B1 iPS cells having the HLA haplotype shown in Table 14, low-antigenic cells were produced in which a rejection reaction was reduced in a case where the cells were allogeneically transplanted into a recipient C having a hypothetical HLA haplotype shown in Table 15. HLA haplotypes shown in Table 15 are HLA haplotypes of peripheral blood mononuclear cells (PBMC, type “LP_266,” CTL).

[0323] As shown in Tables 14 and 15, 604B1 iPS cells had A*01:01 allele, B*37:01 allele, and C*06:02 allele. In addition, these HLA alleles are not present in the recipient C. Accordingly, in a case where the 604B1 iPS cells or cells differentiation-induced from the 604B1 iPS cells are transplanted into the recipient, T cells of the recipient attack the cells and immune rejection occurs.

[0324] For this reason, in order to reduce a rejection reaction, the HLA alleles that are present in the donor cells but not present in the recipient C, that is, the A*01:01 allele, the B*37:01 allele, and the C*06:02 allele, are disrupted such that cells do not express an HLA protein specific to donor cells.

TABLE 14
HLA haplotype of 604B1 iPS cell

| HLA-A | | HLA-B | | HLA-C | |
|---|---|---|---|---|---|
| A*01:01 | A*24:02 | B*07:02 | B*37:01 | C*06:02 | C*07:02 |

TABLE 15
HLA haplotype of virtual recipient C (PBMC “LP_266,” CTL)

| HLA-A | | HLA-B | | HLA-C | |
|---|---|---|---|---|---|
| A*03:01 | A*24:02 | B*07:02 | B*40:02 | C*03:05 | C*07:02 |

[0325] A0101-ex3-g2 (where a target base sequence is set forth in SEQ ID NO: 46) which was specific to the *01:01 allele was used as sgRNA, and the A*01:01 allele of 604B1 iPS cells was knocked out in the same manner as in Experimental Example 9. Subsequently, C0602-ex3-g1 (where a target base sequence is set forth in SEQ ID NO: 52), which was an sgRNA and was specific to the C*06:02 allele, was introduced into the cells to knock out the C*06:02 allele, and subclones of nine strains were obtained.

[0326] Subsequently, genomic DNA was extracted from each subclone. Then, a PCR reaction for amplifying a region containing a target site (exon 3) of A0101-ex3-g2, which is the sgRNA used and a region containing a target site (exon 3) of C0602-ex3-g1 was performed. Thereafter, a base sequence was analyzed by Sanger sequence.

[0327] FIG. 14(a) is a table showing a base mutation pattern of each clone recovered. In FIG. 14(a), “WT” indicates that it was a wild-type base sequence, “−” indicates that it had a deletion mutation, and “+” indicates that it had an insertion mutation. As a result, a clone having some insertion deletion mutation (Indel mutation) near the target site of sgRNA was obtained. In FIG. 14(b), the base sequence is shown as a representative example of a clone #3 in which frameshift mutation had occurred among clones in which Indel mutation had occurred.

[0328] Subsequently, B-ex2-g1 (where a target base sequence is set forth in SEQ ID NO: 53) specific to the HLA-B allele was introduced, as sgRNA, into the clone #3 in which the A*01:01 allele and the C*06:02 allele were knocked out to test whether or not a clone in which only the B*37:01 allele was knocked out could be obtained. B-ex2-g1 is an sgRNA targeting both B*37:01 allele and B*07:02 allele.

[0329] Subsequently, iPS cells were stimulated with 50 ng/ml of IFN-γ for 48 hours to induce the expression of HLA protein. Subsequently, iPS cells were stained with an anti-HLA-B7 antibody (type “MCA986,” Bio-Rad), and analysis was performed by flow cytometry.

[0330] FIG. 15(a) is a graph showing results of flow cytometric analysis. In FIG. 15(a), “No stain” indicates the analysis results of iPS cells that were not stained with an antibody, “No transfection” indicates the analysis results of iPS cells into which sgRNA was not introduced, and “B-ex2-g1” indicates the analysis results of iPS cells into which the sgRNA was introduced and in which the HLA-B allele was knocked out.

[0331] In addition, single cell sorting was performed from a cell population in which an HLA-B7 protein was positive, and subclones of 12 strains (clones #3-1 to #3-12) were recovered. Subsequently, genomic DNA was extracted from each subclone. Next, a PCR reaction was performed for respectively amplifying a target B*37:01 allele and a non-target B*07:02 allele of a region containing a target site (exon 2) of B-ex2-g1, which is the sgRNA used. Thereafter, a base sequence was analyzed by Sanger sequence.

[0332] FIG. 15(b) is a table showing a base mutation pattern of each clone recovered. In FIG. 13(b), “Mut” indicates that it had a substitution mutation, “WT” indicates that it was a wild-type base sequence, “−” had a deletion mutation, and “+” indicates that it had an insertion mutation. As a result, a clone having some insertion deletion mutation (Indel mutation) near the target site of sgRNA was obtained. In FIG. 15(c), base sequences of two strains (clones #3-11 and #3-12) are shown as representative examples among the clones in which the Indel mutation occurs only in the B*37:01 allele.

### Experimental Example 12

### (HLA-Allele-Specific Knockout 6)

[0333] By disrupting an HLA allele of 604B1 iPS cells having an HLA haplotype shown in Table 16, cells in which all three genetic loci of an HLA-A allele, an HLA-B allele, and an HLA-C allele were knocked out were produced. FIG. 16(a) is a diagram showing a target site of an sgRNA used in the present experimental example.

TABLE 16
HLA haplotype of 604B1 iPS cell

| HLA-A | | HLA-B | | HLA-C | |
|---|---|---|---|---|---|
| A*01:01 | A*24:02 | B*07:02 | B*37:01 | C*06:02 | C*07:02 |

[0334] The B*07:02 allele, B*37:01 allele, C*06:02 allele, and C*07:02 allele of 604B1 iPS cells were knocked out in the same manner as in Experimental Example 9 using, as sgRNA, BC-ex2-g1 (where a target base sequence is set forth in SEQ ID NO: 54) capable of targeting both HLA-B allele and HLA-C allele.

[0335] Then, iPS cells were stimulated with 50 ng/mL IFN-γ for 48 hours and subjected to flow cytometric analysis to examine the expression of HLA-B protein and HLA-C protein. FIG. 16(b) is a graph showing the results of flow cytometry. In FIG. 16(b), “No stain” indicates the analysis results of iPS cells that were not stained with an antibody, “No transfection” indicates the analysis results of iPS cells into which sgRNA was not introduced, and “BC-ex2-g1” indicates the analysis results of iPS cells into which the sgRNA was introduced and in which both the HLA-B allele and the HLA-C allele were knocked out.

[0336] Subsequently, a cell population in which both the HLA-B protein and the HLA-C protein was negative was sorted and recovered. Subsequently, A-ex3-g1 (where a target base sequence is set forth in SEQ ID NO: 55) capable of targeting both alleles of an HLA-A gene was introduced into the recovered cell population, and the A*01:01 allele and the A*24:02 allele were knocked out.

[0337] Then, iPS cells were stimulated with 50 ng/mL IFN-γ for 48 hours and subjected to flow cytometric analysis to examine the expression of HLA-A protein, HLA-B protein, and HLA-C protein. FIG. 16(c) is a graph showing the results of flow cytometry. In FIG. 16(c), “No stain” indicates the analysis results of iPS cells that were not stained with an antibody, “No transfection” indicates the analysis results of iPS cells into which sgRNA was not introduced, and “A-ex3-g1” indicates the analysis results of iPS cells into which the sgRNA was introduced and in which the HLA-A allele was knocked out.

[0338] Subsequently, single cell sorting of a cell population in which HLA-A protein, HLA-B protein, and HLA-C protein were all negative was performed to recover subclones of 8 strains. Subsequently, genomic DNA was extracted from each subclone. Then, a PCR reaction for respectively amplifying a region containing a target site which was sgRNA used, was performed. Thereafter, a base sequence was analyzed by Sanger sequence.

[0339] FIG. 17(a) is a table showing a base mutation pattern of one of the recovered clones (clone #1). In FIG. 17(a), “−” indicates that it had a deletion mutation, and “+” indicates that it had an insertion mutation. As a result, it was confirmed that a clone could be obtained, in which an insertion deletion mutation (Indel mutation) had occurred in all of the A*01:01 allele, A*24:02 allele, B*07:02 allele, B*37:01 allele, C*06:02 allele, and C*07:02 allele. FIG. 17(b) shows a base sequence of each HLA allele of the clone #1. In FIG. 17(b), “WT” indicates a wild-type base sequence.

### Experimental Example 13

### (HLA-Allele-Specific Knockout 7)

[0340] By disrupting an HLA allele of 585A1 iPS cells having an HLA haplotype shown in Table 17, cells in which the HLA-A allele and the HLA-B allele were knocked out and only one of the HLA-C allele was knocked out were produced.

TABLE 17
HLA haplotype of 585A1 iPS cell

| HLA-A | | HLA-B | | HLA-C | |
|---|---|---|---|---|---|
| A*24:02 | A*24:02 | B*07:02 | B*52:01 | C*07:02 | C*12:02 |

[0341] The A*24:02 allele, B*07:02 allele, and B*52:01 allele of 585A1 iPS cells were knocked out in the same manner as in Experimental Example 9 using, as sgRNA, A-ex3-g1 capable of targeting the HLA-A allele (where a target base sequence is set forth in SEQ ID NO: 55) and B-ex2-g1 capable of targeting the HLA-B allele (where a target base sequence is set forth in SEQ ID NO: 53).

[0342] Then, iPS cells were stimulated with 50 ng/mL IFN-γ for 48 hours and subjected to flow cytometric analysis to examine the expression of HLA-A24 antigen and HLA-B7 antigen. FIG. 18(a) is a graph showing results of flow cytometry.

[0343] Subsequently, single cell sorting was performed on a cell population in which both HLA-A24 antigen and HLA-B7 antigen were negative, and subclones of 10 strains were recovered. Subsequently, genomic DNA was extracted from each subclone. Then, a PCR reaction for respectively amplifying a region containing a target site which was sgRNA used, was performed. Thereafter, a base sequence was analyzed by Sanger sequence.

[0344] FIG. 18(b) is a table showing a base mutation pattern of each clone recovered. In FIG. 18(b), “WT” indicates that it was a wild-type base sequence, “−” had a deletion mutation, “+” indicates that it had an insertion mutation, and “?” indicates that it could not be determined. As a result, a clone #3 was selected in which it was revealed that insertion deletion mutation (Indel mutations) had occurred in all of the A*24:02 allele, B*07:02 allele, and B*52:01 allele. FIG. 18(c) shows a base sequence of the clone #3.

[0345] Subsequently, C1202-ex3-g1 (where a target base sequence is set forth in SEQ ID NO: 50) specific to the C*12:02 allele was introduced into the clone #3, and the C*12:02 allele was knocked out. Subsequently, subclones of four strains (clones #3-1 to #3-4) were recovered. Subsequently, genomic DNA was extracted from each subclone. Subsequently, a PCR reaction for respectively amplifying the C*07:02 allele and the C*12:02 allele was performed. Thereafter, the base sequence was analyzed by Sanger sequence.

[0346] FIG. 18(d) is a table showing a base mutation pattern of each clone recovered. In FIG. 18(d), “WT” indicates that it was a wild-type base sequence, and “−” indicates that it had a deletion mutation. As a result, it was confirmed that the C*07:02 allele remained and clones of three strains (clones #3-1, #3-2, and #3-3) in which an insertion deletion mutation (Indel mutation) had occurred in the C*12:02 allele were obtained. FIG. 18(e) shows a base sequence of a clone #3-1 as a representative example.

### Experimental Example 14

### (HLA-Allele-Specific Knockout 8)

[0347] By disrupting an HLA allele of 604B1 iPS cells having an HLA haplotype shown in Table 18, cells in which the HLA-A allele and HLA-B allele were knocked out were produced.

TABLE 18
HLA haplotype of 604B1 iPS cell

| HLA-A | | HLA-B | | HLA-C | |
|---|---|---|---|---|---|
| A*01:01 | A*24:02 | B*07:02 | B*37:01 | C*06:02 | C*07:02 |

[0348] The A*01:01 allele, A*24:02 allele, B*07:02 allele, and B*37:01 allele of 604B1 iPS cells were knocked out in the same manner as in Experimental Example 9 using, as sgRNA, A-ex3-g1 capable of targeting the HLA-A allele (where a target base sequence is set forth in SEQ ID NO: 55) and B-ex2-g1 capable of targeting the HLA-B allele (where a target base sequence is set forth in SEQ ID NO: 53).

[0349] Then, iPS cells were stimulated with 50 ng/mL IFN-γ for 48 hours and subjected to flow cytometric analysis to examine the expression of HLA-A24 antigen and HLA-B7 antigen. FIG. 19(a) is a graph showing results of flow cytometry. In FIG. 19(a), “No stain” indicates the analysis results of iPS cells that were not stained with an antibody, “No transfection” indicates the analysis results of iPS cells into which sgRNA was not introduced, and “A-ex2-g1” and “B-ex2-g1” indicate the analysis results of iPS cells into which these sgRNAs were introduced and in which both the HLA-A allele and the HLA-B allele were knocked out.

[0350] Subsequently, a cell population in which both HLA-A24 antigen and HLA-B7 antigen were negative was sorted and recovered, and furthermore, the expression of HLA-A1 antigen was examined. FIG. 19(b) is a graph showing the results of flow cytometry. In FIG. 19(b), “No stain” indicates the analysis results of the iPS cells not stained with an antibody, and “HLA-A24, B7 (−) sorted” indicates the analysis results of a cell population in which both HLA-A24 antigen and HLA-B7 antigen were negative.

[0351] Subsequently, a cell population in which HLA-A1 antigen was negative was sorted and recovered, and subclones of 23 strains were recovered. Subsequently, genomic DNA was extracted from each subclone. Then, a PCR reaction for respectively amplifying a region containing a target site which was sgRNA used, was performed. Thereafter, a base sequence of seven strains was analyzed by Sanger sequence.

[0352] FIG. 19(c) is a table showing a base mutation pattern of each clone recovered. In FIG. 19(c), “WT” indicates that it was a wild-type base sequence, “−” indicates that it had a deletion mutation, and “+” indicates that it had an insertion mutation. As a result, it became clear that clones of six strains could be obtained in which all of the A*01:01 allele, A*24:02 allele, B*07:02 allele, and B*37:01 allele had an insertion deletion mutation (Indel mutation). A base sequence of a clone #4 is shown in FIG. 19(d) as a representative example.

### Experimental Example 15

### (HLA-Allele-Specific Knockout 9)

[0353] By disrupting an HLA allele of 1383D2 iPS cells having an HLA haplotype shown in Table 19, cells in which all three genetic loci of an HLA-A allele, an HLA-B allele, and an HLA-C allele were knocked out were produced. FIG. 20(a) is a diagram showing a target site of an sgRNA used in the present experimental example.

TABLE 19
HLA haplotype of 1383D2 iPS cell

| HLA-A | | HLA-B | | HLA-C | |
|---|---|---|---|---|---|
| A*02:07 | A*32:01 | B*15:02 | B*51:01 | C*08:01 | C*14:02 |

[0354] The B*15:02 allele, B*51:01 allele, C*08:01 allele, and C*14:02 allele of 1383D2 iPS cells were knocked out in the same manner as in Experimental Example 9 using, as sgRNA, BC-ex2-g1 (where a target base sequence is set forth in SEQ ID NO: 54) capable of targeting both HLA-B allele and HLA-C allele.

[0355] Then, iPS cells were stimulated with 50 ng/mL IFN-γ for 48 hours and subjected to flow cytometric analysis to examine the expression of HLA-B protein and HLA-C protein. FIG. 20(b) is a graph showing the results of flow cytometry. In FIG. 20(b), “No stain” indicates the analysis results of iPS cells that were not stained with an antibody, “No transfection” indicates the analysis results of iPS cells into which sgRNA was not introduced, and “BC-ex2-g1” indicates the analysis results of iPS cells into which the sgRNA was introduced and in which both the HLA-B allele and the HLA-C allele were knocked out.

[0356] Subsequently, a cell population in which both the HLA-B protein and the HLA-C protein was negative was sorted and recovered. Subsequently, A-ex3-g1 (where a target base sequence is set forth in SEQ ID NO: 55) capable of targeting both alleles of an HLA-A gene was introduced into the recovered cell population, and the A*02:07 allele and the A*32:01 allele were knocked out.

[0357] Then, iPS cells were stimulated with 50 ng/mL IFN-γ for 48 hours and subjected to flow cytometric analysis to examine the expression of HLA-A protein, HLA-B protein, and HLA-C protein.

[0358] FIG. 20(c) is a graph showing the results of flow cytometry. In FIG. 20(c), “No stain” indicates the analysis results of iPS cells that were not stained with an antibody, “No transfection” indicates the analysis results of iPS cells into which sgRNA was not introduced, and “A-ex3-g1” indicates the analysis results of iPS cells into which the sgRNA was introduced and in which the HLA-A allele was knocked out. As a result, the presence of a cell population in which all of HLA-A protein, HLA-B protein, and HLA-C protein were negative was confirmed.

### Experimental Example 16

### (Modification of HLA Allele)

[0359] An examination was conducted to modify the A*02:07 allele of 1383D2 iPS cells having an HLA haplotype shown in Table 20 into the A*01:01 allele by genome editing.

TABLE 20
HLA haplotype of 1383D2 iPS cell

| HLA-A | | HLA-B | | HLA-C | |
|---|---|---|---|---|---|
| A*02:07 | A*32:01 | B*15:02 | B*51:01 | C*08:01 | C*14:02 |

[0360] First, a double-regulated Cas9 expression vector and an sgRNA expression vector, both of which are piggyBac transposon vectors, were introduced into 1383D2 iPS cells. Drug selection was performed for 5 days using Puromycin (Cat. No. 29455-54, NACALAI TESQUE, INC.) at a final concentration of 1 to 15 μg/mL or hygromycin B (Cat. No. 10687-010, Thermo Fisher Scientific) at a final concentration of 100 to 200 μg/mL. Thereby, a cell population into which the chromosome was stably introduced was obtained.

[0361] The double-regulated Cas9 expression vector is a Cas9 expression vector capable of controlling both expression induction and intracellular localization (Ishida et al., Site-specific randomization of the endogenous genome by a regulatable CRISPR-Cas9 piggyBac system in human cells, Sci. Rep., 8:310, 2018). In the present experimental example, a double-regulated Cas9 expression vector capable of inducing expression of a fusion protein of Cas9 protein and glucocorticoid receptor (GR) (hereinafter referred to as a “Cas9-GR protein”) by adding doxycycline (Dox) to a medium of cells, and capable of translocating Cas9-GR into the nucleus by adding dexamethasone (Dex) to the medium of cells, was used. In addition, as the sgRNA, A0207-ex3-g1 (where a target base sequence is set forth in SEQ ID NO: 3) was used.

[0362] FIG. 21(a) and FIG. 21(b) are schematic diagrams illustrating homologous recombination in the present experimental example. Then, in order to induce homologous recombination, single-stranded DNA (where a target base sequence is set forth in SEQ ID NO: 56) encoding a region containing exons 1 to 3 of the A*01:01 allele was produced.

[0363] Specifically, first, using genomic DNA of 604B1 iPS cells as a template, a portion from 67 bases upstream of exon 1 to 1247 bases downstream of exon 3 of the A*01:01 allele was amplified by PCR using a primer shown in Table 21, and integrated into a pENTR plasmid to produce a pENTR vector.

TABLE 21

| | | SEQ |
|---|---|---|
| | | ID |
| Primer name | Base sequence | NO. |
| 604B1-HLA-A-be- | ccaattcagtcgacgGTCGCGGTCGC | 57 |
| ex1 + 15 bp-fwd | TGTTCTAA | |
| 604B1-HLA-A-in3 + | gtctagatatctcgaTCATCAGTATT | 58 |
| 15 bp-rev | CGAGGGATCGTCT | |

[0364] Subsequently, this plasmid DNA was treated with nicking endonuclease Nb. BsrDI enzyme (Model number “R0648S,” New England Biolabs), agarose electrophoresis was performed under formamide denaturing conditions, the corresponding DNA band was cut out and purified, and thereby a desired single-stranded DNA donor (lssDNA donor, SEQ ID NO: 56) was prepared.

[0365] Subsequently, a PENTR vector (dsDNA donor) in a double-stranded DNA state and prepared single-stranded DNA (lssDNA donor, SEQ ID NO: 56) were respectively introduced into 1383D2 iPS cells, Dox and Dex were added at final concentrations of 2 μM and 1 μM, respectively, and homologous recombination was induced by genome editing.

[0366] Then, respective iPS cells were stimulated with 50 ng/mL IFN-γ for 48 hours and subjected to flow cytometric analysis to examine the expression of HLA-A2 antigen and HLA-A1 antigen.

[0367] FIG. 21(c) is a graph showing the results of flow cytometry. In FIG. 20(c), “No stain” indicates the analysis results of iPS cells that were not stained with an antibody, “No Dox/Dex” indicates the analysis results of iPS cells that did not induce Cas9 expression, “dsDNA donor” indicates the analysis results of iPS cells in which a double-stranded DNA donor was introduced to induce homologous recombination, and “lssDNA donor” indicates the analysis results of iPS cells in which a single-stranded DNA donor was introduced to induce homologous recombination.

[0368] As a result, a ratio of negative A2 antigen and positive A1 antigen was 0.2% in a case where double-stranded DNA was used as a donor, and was 1.6% in a case where single-stranded DNA was used as a donor.

[0369] Subsequently, a cell population in which the A2 antigen became negative and the A1 antigen became positive by homologous recombination using a single-stranded DNA donor was sorted by flow cytometry, and a base sequence of the HLA-A genetic locus was analyzed for the cell population and subclones after single cell sorting.

[0370] FIG. 22(a) is a diagram showing the results of analyzing a base sequence of the cell population as it is. In FIG. 22(a), “Bulk” indicates the results obtained by analyzing the cell population as it is. As a result, it was revealed that cells in which part of the A*02:07 genetic locus (particularly a 5′ side of exon 2 and exon 3) was modified to an A*01:01 gene were present in combination.

[0371] In addition, FIG. 22(b) is a diagram showing the results of analyzing a base sequence of a typical single cell-sorted subclone (clone #2). As a result, it was revealed that part of the A*02:07 genetic locus was modified to the A*01:01 gene.

### Experimental Example 17

### (Production 1 of B2M Knockout iPS Cell)

[0372] 1383D2 iPS cells were transfected with a plasmid vector expressing Cas9 and B2M-specific sgRNA. As sgRNA, B2M-g1 (where a target base sequence is set forth in SEQ ID NO: 59) and B2M-g2 (where a target base sequence is set forth in SEQ ID NO: 60) were used.

[0373] Subsequently, cells stimulated with 50 ng/mL IFN-γ for 48 hours were stained with an anti-HLA-ABC antibody, and flow cytometric analysis was performed.

[0374] FIG. 23(a) is a graph showing results of flow cytometry. In FIG. 23(a), “No stain” indicates the analysis results of iPS cells that were not stained with an antibody, “No transfection” indicates the analysis results of iPS cells into which sgRNA was not introduced, and “B2M-g1” and “B2M-g2” indicate the analysis results of iPS cells into which the sgRNA was introduced and in which the B2M allele was knocked out.

[0375] As a result, a proportion of the cell population in which all of HLA-A protein, HLA-B protein, and HLA-C protein were negative was 2.8% in a case where B2M-g1 (where a target base sequence is set forth in SEQ ID NO: 59) was used as sgRNA. Furthermore, a proportion thereof was 6.9% in a case where B2M-g2 (where a target base sequence is set forth in SEQ ID NO: 60) was used as sgRNA.

[0376] Subsequently, single cell sorting was performed from a cell population in which HLA-A, HLA-B, and HLA-C were all negative, which were obtained by the introduction of B2M-g2 sgRNA. Thereby, subclones of two strains of clones #1 and #2 were obtained.

[0377] The obtained subclones of two strains were stimulated again with IFN-γ for 48 hours, and flow cytometric analysis was performed. FIG. 23(b) is a graph showing the results of flow cytometry. In FIG. 23(b), “B2M-KO #1” indicates the results of the clone #1, and “B2M-KO #2” indicates the results of the clone #2. As a result, it was confirmed that HLA-A, HLA-B, and HLA-C were all negative in all the clones.

[0378] Subsequently, the B2M gene of the clone #1 was amplified by PCR to check a base sequence, and it was confirmed that an insertion deletion mutation (Indel mutation) had been introduced. FIG. 23(c) shows a base sequence of the B2M allele of the clone #1. In FIG. 23(c), “WT” indicates a wild-type base sequence.

### Experimental Example 18

### (Production 2 of B2M Knockout iPS Cell)

[0379] 604B1 iPS cells were subjected to the same operation as in Experimental Example 17 to knock out the B2M allele. B2M-g2 (where a target base sequence is set forth in SEQ ID NO: 60) was used as sgRNA.

[0380] Subsequently, cells stimulated with 50 ng/mL IFN-γ for 48 hours were stained with an anti-HLA-ABC antibody, and flow cytometric analysis was performed.

[0381] FIG. 24(a) is a graph showing results of flow cytometry. In FIG. 24(a), “No stain” indicates the analysis results of iPS cells that were not stained with an antibody, “No transfection” indicates the analysis results of iPS cells into which sgRNA was not introduced, and “B2M-g2” indicates that these sgRNAs were introduced to knock out the B2M allele. As a result, it became clear that a cell population in which all of HLA-A protein, HLA-B protein, and HLA-C protein were negative could be obtained.

[0382] Subsequently, single cell sorting was performed from a cell population in which HLA-A, HLA-B, and HLA-C were all negative. Thereby, subclones of four strains of clones #1, #2, #3, and #4 were obtained.

[0383] Then, the B2M gene of these subclones was amplified by PCR to check a base sequence. FIG. 24(b) is a diagram showing results of analysis of a base sequence. As a result, it was confirmed that an insertion deletion mutation (Indel mutation) was introduced into all the subclones.

### Experimental Example 19

### (Test 1 of T Cell Activation)

[0384] (1) 604B1 iPS cells having an HLA haplotype shown in Table 22, (2) a clone #8 which was produced in Experimental Example 8 and in which the A*01:01 and B*07:02 alleles of the 604B1 iPS cells had been knocked out, (3) same clone #10, (4) 1383D2 iPS cells having an HLA haplotype in Table 23, and (5) 604B1 iPS cells (clone #1) which were produced in Experimental Example 18 and in which the B2M allele had been knocked out were respectively differentiation-induced into blood-cell-like cells derived from embryoid body (EB).

TABLE 22
HLA haplotype of 604B1 iPS cell

| HLA-A | | HLA-B | | HLA-C | |
|---|---|---|---|---|---|
| A*01:01 | A*24:02 | B*07:02 | B*37:01 | C*06:02 | C*07:02 |

TABLE 23
HLA haplotype of 1383D2 iPS cell

| HLA-A | | HLA-B | | HLA-C | |
|---|---|---|---|---|---|
| A*02:07 | A*32:01 | B*15:02 | B*51:01 | C*08:01 | C*14:02 |

[0385] Subsequently, CD8-positive T cells recovered by sorting from peripheral blood mononuclear cells having an HLA haplotype shown in Table 24 (PBMC, type “LP_194,” CTL, corresponding to the above-mentioned recipient A) were stained with CFSE (Cayman Chemical Co., Ltd.). The cells were co-cultured with EB-derived blood-cell-like cells differentiated from the respective cells of (1) to (5) in the presence of IL-2 and IFN-γ for 8 days.

TABLE 24
HLA haplotype of PBMC (LP_194, CTL)

| HLA-A | | HLA-B | | HLA-C | |
|---|---|---|---|---|---|
| A*24:02 | A*24:02 | B*37:01 | B*39:06 | C*06:02 | C*07:02 |

[0386] After co-culture, flow cytometric analysis was performed to examine fluorescence of CFSE. FIGS. 25(a) to 25(e) are graphs showing results of flow cytometry. FIGS. 25(a) to 25(e) show the results of CD8-positive T cells co-cultured with EB-derived blood-cell-like cells differentiated from the respective cells of (1) to (5). As a result, it was confirmed that only a T cell population that specifically recognized an HLA antigen of each of the iPS cells proliferated, and CFSE became negative.

### Experimental Example 20

### (Test 2 of T Cell Activation)

[0387] (1) 585A1 iPS cells having an HLA haplotype shown in Table 25, (2) a clone #2 which was produced in Experimental Example 9 and in which the B*07:02 and C*07:02 alleles of the 585A1 iPS cells had been knocked out, (3) same clone #11, (4) same clone #26, (5) 1383D2 iPS cells having an HLA haplotype in Table 26, and (6) 604B1 iPS cells (clone #1) which were produced in Experimental Example 18 and in which the B2M had been knocked out were respectively differentiation-induced into EB-derived blood-cell-like cells.

TABLE 25
HLA haplotype of 585A1 iPS cell

| HLA-A | | HLA-B | | HLA-C | |
|---|---|---|---|---|---|
| A*24:02 | A*24:02 | B*07:02 | B*52:01 | C*07:02 | C*12:02 |

TABLE 26
HLA haplotype of 1383D2 iPS cell

| HLA-A | | HLA-B | | HLA-C | |
|---|---|---|---|---|---|
| A*02:07 | A*32:01 | B*15:02 | B*51:01 | C*08:01 | C*14:02 |

[0388] Subsequently, CD8-positive T cells recovered by sorting from peripheral blood mononuclear cells having an HLA haplotype shown in Table 27 (PBMC, type “2010113203,” Wako, corresponding to the above-mentioned recipient B) were stained with CFSE (Cayman Chemical Co., Ltd.). The cells were co-cultured with EB-derived blood-cell-like cells differentiated from the respective cells of (1) to (6) in the presence of IL-2 and IFN-γ for 8 days.

TABLE 27
HLA haplotype of PBMC (“2010113203,” Wako)

| HLA-A | | HLA-B | | HLA-C | |
|---|---|---|---|---|---|
| A*24:02 | A*24:02 | B*40:06 | B*52:01 | C*08:01 | C*12:02 |

[0389] After co-culture, flow cytometric analysis was performed to examine fluorescence of CFSE. FIGS. 26(a) to 26(f) are graphs showing results of flow cytometry. FIGS. 26(a) to 26(f) show the results of CD8-positive T cells co-cultured with EB-derived blood-cell-like cells differentiated from the respective cells of (1) to (6). As a result, it was confirmed that a T cell population that specifically recognized an HLA antigen of each of the iPS cells proliferated, and CFSE became negative.

### Experimental Example 21

### (Test 3 of T Cell Activation)

[0390] (1) 604B1 iPS cells having an HLA haplotype shown in Table 28, (2) a clone #3-11 which was produced in Experimental Example 11 and in which the A*01:01, B*37:01, and C*06:02 alleles of the 604B1 iPS cells had been knocked out, (3) same clone #3-12, (4) 1383D2 iPS cells having an HLA haplotype in Table 29, and (5) 604B1 iPS cells (clone #1) which were produced in Experimental Example 18 and in which the B2M had been knocked out were respectively differentiation-induced into EB-derived blood-cell-like cells.

TABLE 28
HLA haplotype of 604B1 iPS cell

| HLA-A | | HLA-B | | HLA-C | |
|---|---|---|---|---|---|
| A*01:01 | A*24:02 | B*07:02 | B*37:01 | C*06:02 | C*07:02 |

TABLE 29
HLA haplotype of 1383D2 iPS cell

| HLA-A | | HLA-B | | HLA-C | |
|---|---|---|---|---|---|
| A*02:07 | A*32:01 | B*15:02 | B*51:01 | C*08:01 | C*14:02 |

[0391] Subsequently, CD8-positive T cells recovered by sorting from peripheral blood mononuclear cells having an HLA haplotype shown in Table 30 (PBMC, type “LP_266,” CTL, corresponding to the above-mentioned recipient C) were stained with CFSE (Cayman Chemical Co., Ltd.). The cells were co-cultured with EB-derived blood-cell-like cells differentiated from the respective cells of (1) to (5) in the presence of IL-2 and IFN-γ for 8 days.

TABLE 30
HLA haplotype of PBMC (LP_266, CTL)

| HLA-A | | HLA-B | | HLA-C | |
|---|---|---|---|---|---|
| A*03:01 | A*24:02 | B*07:02 | B*40:02 | C*03:05 | C*07:02 |

[0392] After co-culture, flow cytometric analysis was performed to examine fluorescence of CFSE. FIGS. 27(a) to 27(e) are graphs showing results of flow cytometry. FIGS. 27(a) to 27(e) show the results of CD8-positive T cells co-cultured with EB-derived blood-cell-like cells differentiated from the respective cells of (1) to (5). As a result, it was confirmed that a T cell population that specifically recognized an HLA antigen of each of the iPS cells proliferated, and CFSE became negative.

### Experimental Example 22

### (Preparation of HLA-Antigen-Reactive CD8-Positive T Cells)

[0393] CD8-positive T cells reactive with an HLA antigen of 604B1 iPS cells were prepared. Peripheral blood mononuclear cell (PBMC)-derived T cells were present in combination with T cells that recognized various antigens. Among these T cells, CD8-positive T cells reactive with the HLA antigen of 604B1 iPS cells were stimulated to proliferate and were recovered.

[0394] FIG. 28 is a schematic diagram showing a procedure of the present experimental example. As shown in FIG. 28, first, 604B1 iPS cells were differentiated into EB-derived blood-cell-like cells. The EB-derived blood-cell-like cells include CD45-positive leukocytes. Subsequently, CD8-positive T cells contained in PBMC were stained with CFSE (Cayman Chemical Co.) and co-cultured with EB-derived blood-cell-like cells differentiated from 604B1 iPS cells in the presence of IL-2 and IFN-γ for 8 days.

[0395] Subsequently, after co-culture, flow cytometric analysis was performed to examine fluorescence of CFSE. FIGS. 29(a) to 29(e) are graphs showing results of flow cytometry.

[0396] FIG. 29(a) shows the results of co-culturing a PBMC cell population with a PBMC cell population of allogeneic cells (allo), FIG. 29(b) shows the results of co-culturing the PBMC cell population with EB-derived blood-cell-like cells differentiated from 604B1 iPS cells, FIG. 29(c) shows the results of culturing only the PBMC cell population, FIG. 29(d) shows the results of co-culturing CD8-positive T cells recovered from the PBMC cell population by sorting with EB-derived blood-cell-like cells differentiated from 604B1 iPS cells, and FIG. 29(e) shows the results of culturing only CD8-positive T cells recovered from the PBMC cell population by sorting. As a result, it was confirmed that a T cell population that specifically recognized an incompatible HLA antigen proliferated, and CFSE became negative.

[0397] Subsequently, CD8-positive T cells that became CFSE-negative as shown in FIG. 29(d) were sorted and recovered. Thereby, T cells reactive with the HLA antigen of 604B1 iPS cells were obtained.

### Experimental Example 23

### (Test 1 of T Cell Cytotoxicity)

[0398] FIG. 30 is a schematic diagram showing a procedure of the present experimental example. First, (1) 604B1 iPS cells having an HLA haplotype shown in Table 31, (2) a clone #8 which was produced in Experimental Example 8 and in which the A*01:01 and B*07:02 alleles of the 604B1 iPS cells had been knocked out, (3) same clone #10, and (4) 1383D2 iPS cells (clone #1) which were produced in Experimental Example 17 and in which the B2M had been knocked out, were respectively differentiation-induced into cardiomyocytes.

TABLE 31
HLA haplotype of 604B1 iPS cell

| HLA-A | | HLA-B | | HLA-C | |
|---|---|---|---|---|---|
| A*01:01 | A*24:02 | B*07:02 | B*37:01 | C*06:02 | C*07:02 |

[0399] Subsequently, each cardiomyocyte was stimulated with IFN-γ to induce the expression of HLA protein. Subsequently, in order to perform a 51Cr release assay to be described later, 51Cr (chromium) was added to a medium and incorporated into each cardiomyocyte.

[0400] Subsequently, CD8-positive T cells reactive with the HLA antigen of 604B1 iPS cells prepared in Experimental Example 22 were added to the medium of each cardiomyocyte at various ratios to examine whether each cardiomyocyte was attacked. That is, the CD8 T cells reactive with the HLA antigen prepared in Experimental Example 22 were used as effector cells, and the above-described cardiomyocytes derived from iPS cells were used as target cells. A ratio of the number of CD8-positive T cells to be added was 0.625, 1.25, 2.5, 5, and 10 with respect to cardiomyocytes 1.

[0401] When cardiomyocytes are attacked by CD8-positive cells, the cells are damaged and 51Cr is released from the inside of the cells. Accordingly, by measuring 51Cr released into the medium, it is possible to determine whether or not each cardiomyocyte is attacked. This is called 51Cr release assay. An amount of 51Cr contained in the supernatant of the cardiomyocytes that had not been treated after labeling with 51Cr was defined as 0% Specific Lysis. A value obtained by subtracting an amount of 51Cr released in the supernatant when 51Cr-labeled cardiomyocytes were cultured in a normal medium from an amount of 51Cr released in the supernatant when 51Cr-labeled cardiomyocytes were treated by a surfactant (Triton-X) and killed was defined as 100% Specific Lysis.

[0402] FIG. 31 is a graph showing a ratio of each cardiomyocyte damaged and lysed. In FIG. 31, the symbol “*” indicates that there is a significant difference at P<0.05, “Non-edited” indicates the results of cardiomyocytes differentiation-induced the 604B1 iPS cells of (1), “A1⁻B7⁻#8” indicates the results of the cardiomyocytes differentiation-induced the clone #8 of (2), “A1⁻B7⁻#10” indicates the results of the cardiomyocytes differentiation-induced the clone #10 of (3), and “1383D2-B2M⁻#1” indicates the results of cardiomyocytes differentiation-induced the 1383D2 iPS cells (clone #1) of (4) in which B2M had been knocked out.

[0403] As a result, it was revealed that the cardiomyocytes differentiation-induced from the 604B1 iPS cells had a higher degree of injury when a proportion of CD8-positive T cells as effectors was increased.

[0404] In contrast, it was clarified that the cardiomyocytes differentiation-induced from the 1383D2 iPS cells in which B2M had been knocked out were not damaged even when a proportion of CD8-positive T cells as effectors was increased. Similarly, it was clarified that the cardiomyocytes differentiation-induced from the clones #8 and #10 in which the A*01:01 and B*07:02 alleles of 604B1 iPS cells were knocked out were not damaged even when a proportion of CD8-positive T cells as effectors was increased.

[0405] These results show that it is possible to reduce a rejection reaction in a case where cells were differentiation-induced and allogeneically transplanted by disrupting the HLA allele of iPS cells.

[0406] In addition, the fact that the respective iPS cells of (2) to (4) were able to be differentiation-induced into cardiomyocytes indicates that expression of HLA protein could be maintained by the IFN-γ treatment while maintaining pluripotency of pluripotent stem cells.

### Experimental Example 24

### (Test 2 of T Cell Cytotoxicity)

[0407] The iPS cells of (1) to (4) similar to those of Experimental Example 23 were differentiation-induced into EB-derived blood-cell-like cells, and 51Cr release assay was performed.

[0408] First, (1) 604B1 iPS cells, (2) a clone #8 which was produced in Experimental Example 7 and in which the A*01:01 and B*07:02 alleles of the 604B1 iPS cells had been knocked out, (3) same clone #10, and (4) 604B1 iPS cells (clone #1) which were produced in Experimental Example 18 and in which the B2M had been knocked out were respectively differentiation-induced into EB-derived blood-cell-like cells. The EB-derived blood-cell-like cells include blood cells.

[0409] Subsequently, CD8-positive T cells reactive with the HLA antigen of 604B1 iPS cells prepared in Experimental Example 22 were added to the medium of each EB-derived blood-cell-like cell at various ratios to examine whether each EB-derived blood-cell-like cell was attacked. That is, the CD8 T cells reactive with the HLA antigen prepared in Experimental Example 21 were used as effector cells, and the above-described EB-derived blood-cell-like cells were used as target cells. A ratio of the number of CD8-positive T cells to be added was 0.625, 1.25, 2.5, 5, 10, and 20 with respect to EB-derived blood-cell-like cells 1.

[0410] FIG. 32 is a graph showing a ratio of each EB-derived blood-cell-like cell damaged and lysed. In FIG. 32, the symbol “*” indicates that there is a significant difference at P<0.05, “Non-edited” indicates the results of EB-derived blood-cell-like cells differentiation-induced from the 604B1 iPS cells of (1), “A1⁻B7⁻#8” indicates the results of the EB-derived blood-cell-like cells differentiation-induced from the clone #8 of (2), “A1⁻B7⁻#10” indicates the results of the EB-derived blood-cell-like cells differentiation-induced from the clone #10 of (3), and “604B1-B2M⁻#1” indicates the results of EB-derived blood-cell-like cells differentiation-induced from the 604B1 iPS cells (clone #1) of (4) in which B2M had been knocked out.

[0411] As a result, it was revealed that the EB-derived blood-cell-like cells differentiation-induced from the 604B1 iPS cells had a higher degree of injury when a proportion of CD8-positive T cells as effectors was increased.

[0412] In contrast, it was clarified that the EB-derived blood-cell-like cells differentiation-induced from the 604B1 iPS cells in which B2M had been knocked out were not damaged even when a proportion of CD8-positive T cells as effectors was increased. Similarly, it was clarified that the EB-derived blood-cell-like cells differentiation-induced from the clones #8 and #10 in which the A*01:01 and B*07:02 alleles of 604B1 iPS cells were knocked out were not damaged even when a proportion of CD8-positive T cells as effectors was increased.

[0413] These results show that it is possible to reduce a rejection reaction in a case where cells were differentiation-induced and allogeneically transplanted by disrupting the HLA allele of iPS cells.

[0414] In addition, the fact that the respective iPS cells of (2) to (4) were able to be differentiation-induced into EB-derived blood-cell-like cells indicates that expression of HLA protein could be maintained by the IFN-γ treatment while maintaining pluripotency of pluripotent stem cells.

### Experimental Example 25

### (Test 3 of T Cell Cytotoxicity)

[0415] The same examination as in Experimental Example 24 was performed except that iPS cells different from those in Experimental Example 24 were used. First, (1) 585A1 iPS cells having an HLA haplotype shown in Table 32, (2) a clone #2 which was produced in Experimental Example 9 and in which the B*07:02 and C*07:02 alleles of the 585A1 iPS cells had been knocked out, (3) same clone #11, (4) same clone #26, and (5) 604B1 iPS cells (clone #1) which were produced in Experimental Example 18 and in which the B2M had been knocked out were respectively differentiation-induced into EB-derived blood-cell-like cells. The EB-derived blood-cell-like cells include blood cells.

TABLE 32
HLA haplotype of 585A1 iPS cell

| HLA-A | | HLA-B | | HLA-C | |
|---|---|---|---|---|---|
| A*24:02 | A*24:02 | B*07:02 | B*52:01 | C*07:02 | C*12:02 |

[0416] Subsequently, CD8-positive T cells as effectors derived from peripheral blood mononuclear cells having HLA haplotypes shown in Table 33 (corresponding to PBMC, type “2010113203,” Wako, the above-mentioned recipient B) were added to a medium of each EB-derived blood-cell-like cell at various ratios to examine whether or not each EB-derived blood-cell-like cell was attacked. As the effector cells, the CD8-positive T cells in CFB-negative PBMC shown in FIG. 26(a) of Experimental Example 20 were sorted and used. In addition, target cells were the above-mentioned EB-derived blood-cell-like cells. A ratio of the number of CD8-positive T cells to be added as effectors was 0.625, 1.25, 2.5, 5, 10, and 20 with respect to EB-derived blood-cell-like cells 1.

TABLE 33
HLA haplotype of PBMC (“2010113203,” Wako)

| HLA-A | | HLA-B | | HLA-C | |
|---|---|---|---|---|---|
| A*24:02 | A*24:02 | B*40:06 | B*52:01 | C*08:01 | C*12:02 |

[0417] FIG. 33 is a graph showing a ratio of each EB-derived blood-cell-like cell damaged and lysed. In FIG. 33, the symbol “*” indicates that there is a significant difference at P<0.05, “Non-edited” indicates the results of EB-derived blood-cell-like cells differentiation-induced from the 585A1 iPS cells of (1), “B7⁻C7⁻#2” indicates the results of the EB-derived blood-cell-like cells differentiation-induced from the clone #2 of (2), “B7⁻C7⁻#11” indicates the results of the EB-derived blood-cell-like cells differentiation-induced from the clone #11 of (3), “B7⁻C7⁻#26” indicates the results of the EB-derived blood-cell-like cells differentiation-induced from the clone #26 of (4), and “604B1-B2M⁻#1” indicates the results of EB-derived blood-cell-like cells differentiation-induced from the 604B1 iPS cells (clone #1) of (5) in which B2M had been knocked out.

[0418] As a result, it was revealed that the EB-derived blood-cell-like cells differentiation-induced from the 585A1 iPS cells had a higher degree of injury when a proportion of CD8-positive T cells as effectors was increased.

[0419] In contrast, it was clarified that the EB-derived blood-cell-like cells differentiation-induced from the 604B1 iPS cells in which B2M had been knocked out were not damaged even when a proportion of CD8-positive T cells as effectors was increased. Similarly, it was clarified that the EB-derived blood-cell-like cells differentiation-induced from the clones #2, #11, and #26 in which the B*07:02 and C*07:02 alleles of 585A1 iPS cells were knocked out were not damaged even when a proportion of CD8-positive T cells as effectors was increased.

[0420] These results show that it is possible to reduce a rejection reaction in a case where cells were differentiation-induced and allogeneically transplanted by disrupting the HLA allele of iPS cells.

[0421] In addition, the fact that the respective iPS cells of (2) to (5) were able to be differentiation-induced into EB-derived blood-cell-like cells indicates that expression of HLA protein could be maintained by the IFN-γ treatment while maintaining pluripotency of pluripotent stem cells.

### Experimental Example 26

### (Test 4 of T Cell Cytotoxicity)

[0422] The 604B1 iPS cells having HLA haplotypes shown in Table 34 and the 604B1 iPS cells (clone #1) which were produced in Experimental Example 18 and in which B2M had been knocked out were mixed with cells obtained by labeling, with CFSE, peripheral blood mononuclear cells having an HLA haplotype shown in Table 35 (PBMC, type “LP_266,” CTL, corresponding to the above-mentioned recipient C). These cells were co-cultured for 7 days.

TABLE 34
HLA haplotype of 604B1 iPS cell

| HLA-A | | HLA-B | | HLA-C | |
|---|---|---|---|---|---|
| A*01:01 | A*24:02 | B*07:02 | B*37:01 | C*06:02 | C*07:02 |

TABLE 35
HLA haplotype of PBMC (LP_266, CTL)

| HLA-A | | HLA-B | | HLA-C | |
|---|---|---|---|---|---|
| A*03:01 | A*24:02 | B*07:02 | B*40:02 | C*03:05 | C*07:02 |

[0423] After co-culture, flow cytometric analysis was performed to examine fluorescence of CFSE. FIGS. 34(a) and 34(b) are graphs showing results of flow cytometry. In FIGS. 34(a) and 34(b), “604B1-B2M⁻#1” indicates the results of PBMC co-cultured with the 604B1 iPS cells (clone #1) in which B2M had been knocked out, and “604B1” indicates the results of PBMC co-cultured with the 604B1 iPS cells.

[0424] As a result, as shown in FIG. 34(a), 11.3% of CD8-positive and CSFE-negative T cells were contained in the PBMC co-cultured with the 604B1 iPS cells (clone #1) in which B2M had been knocked out. Furthermore, as shown in FIG. 34(b), 21.3% of CD8-positive and CSFE-negative T cells were contained in the PBMC co-cultured with the 604B1 iPS cells. Subsequently, from the PBMC co-cultured with the 604B1 iPS cells shown in FIG. 34(b), CD8-positive and CSFE-negative cells were sorted and recovered as effector CD8-positive T cells.

[0425] Subsequently, (1) 604B1 iPS cells; (2) clone #3-11 which was produced in Experimental Example 11 and in which A*01:01 allele, B*37:01 allele, and C*06:02 allele of the 604B1 iPS cells had been knocked out; and (3) the same clone #3-12 were respectively differentiation-induced into EB-derived blood-cell-like cells. The EB-derived blood-cell-like cells include blood cells.

[0426] Subsequently, the recovered effector CD8-positive T cells were added to the medium of each EB-derived blood-cell-like cell at various ratios to examine whether each EB-derived blood-cell-like cell was attacked. That is, target cells were EB-derived blood-cell-like cells that had been differentiation-induced from the cells of (1) to (3). A ratio of the number of CD8-positive T cells to be added as effectors was 0.625, 1.25, 2.5, 5, 10, and 20 with respect to EB-derived blood-cell-like cells 1.

[0427] FIG. 34(c) is a graph showing a ratio of each EB-derived blood-cell-like cell damaged and lysed. In FIG. 34(c), the symbol “*” indicates that there is a significant difference at P<0.05, “Non-edited” indicates the results of EB-derived blood-cell-like cells differentiation-induced from the 604B1 iPS cells of (1), “A1⁻B37⁻C6⁻#3-11” indicates the results of the EB-derived blood-cell-like cells differentiation-induced from the clone #3-11 of (2), and “A1⁻B37⁻C6⁻#3-12” indicates the results of the EB-derived blood-cell-like cells differentiation-induced from the clone #3-12 of (3).

[0428] As a result, it was revealed that the EB-derived blood-cell-like cells differentiation-induced from the 604B1 iPS cells had a higher degree of injury when a proportion of CD8-positive T cells as effectors was increased.

[0429] In contrast, it was clarified that the EB-derived blood-cell-like cells differentiation-induced from the clones #3-11 and #3-12 in which the A*01:01 allele, B*37:01 allele, and C*06:02 allele of 604B1 iPS cells were knocked out were not damaged even when a proportion of CD8-positive T cells as effectors was increased.

[0430] These results show that it is possible to reduce a rejection reaction in a case where cells were differentiation-induced and allogeneically transplanted by disrupting the HLA allele of iPS cells.

[0431] In addition, the fact that the respective iPS cells of (2) and (3) were able to be differentiation-induced into EB-derived blood-cell-like cells indicates that expression of HLA protein could be maintained by the IFN-γ treatment while maintaining pluripotency of pluripotent stem cells.

### Experimental Example 27

### (Reactivity Test 1 of NK Cells)

[0432] (1) 604B1 iPS cells having an HLA haplotype shown in Table 36, (2) a clone #8 which was produced in Experimental Example 8 and in which the A*01:01 and B*07:02 alleles of the 604B1 iPS cells had been knocked out, (3) same clone #10, (4) 1383D2 iPS cells having an HLA haplotype in Table 37, and (5) 604B1 iPS cells (clone #1) which were produced in Experimental Example 18 and in which the B2M had been knocked out were respectively differentiated into EB-derived blood-cell-like cells. The EB-derived blood-cell-like cells include CD45-positive leukocytes.

TABLE 36
HLA haplotype of 604B1 iPS cell

| HLA-A | | HLA-B | | HLA-C | |
|---|---|---|---|---|---|
| A*01:01 | A*24:02 | B*07:02 | B*37:01 | C*06:02 | C*07:02 |

TABLE 37
HLA haplotype of 1383D2 iPS cell

| HLA-A | | HLA-B | | HLA-C | |
|---|---|---|---|---|---|
| A*02:07 | A*32:01 | B*15:02 | B*51:01 | C*08:01 | C*14:02 |

[0433] In addition, CD56-positive cells (NK cells) were recovered from PBMC having an HLA haplotype shown in Table 38 (type “LP_194,” CTL, corresponding to the above-mentioned recipient A) by sorting. Subsequently, the recovered NK cells were co-cultured with each of differentiated CD45-positive leukocytes in the presence of the anti-CD107a antibody. As a result, when the NK cells were activated, they became CD107a-positive. After co-culture, flow cytometric analysis was performed to measure a percentage of activated NK cells.

TABLE 38
HLA haplotype of PBMC (LP_194, CTL)

| HLA-A | | HLA-B | | HLA-C | |
|---|---|---|---|---|---|
| A*24:02 | A*24:02 | B*37:01 | B*39:06 | C*06:02 | C*07:02 |

[0434] FIGS. 35(a) to 35(g) are graphs showing results of flow cytometric analysis. FIG. 35(a) shows the results of culturing only NK cells and analyzing them. FIG. 35(b) shows the results of analysis of NK cells co-cultured with EB-derived blood-cell-like cells differentiation-induced from 604B1 iPS cells. FIG. 35(c) shows the results of analysis of NK cells co-cultured with EB-derived blood-cell-like cells differentiation-induced from the clone #8 in which the A*01:01 and B*07:02 alleles of 604B1 iPS cells were knocked out. FIG. 35(d) shows the results of analysis of NK cells co-cultured with EB-derived blood-cell-like cells differentiation-induced from the clone #10. FIG. 35(e) shows the results of analysis of NK cells co-cultured with EB-derived blood-cell-like cells differentiation-induced from 1383D2 iPS cells. FIG. 35(f) shows the results of analysis of NK cells co-cultured with EB-derived blood-cell-like cells differentiation-induced from 604B1 iPS cells in which B2M had been knocked out. FIG. 35(g) shows the results of analysis of NK cells co-cultured with K562 cells known not to express HLA antigen, as a positive control.

[0435] As a result, it was revealed that 5.9% of NK cells co-cultured with K562 cells were activated. In addition, it was revealed that 3.2% of NK cells co-cultured with EB-derived blood-cell-like cells differentiation-induced from 604B1 iPS cells in which B2M had been knocked out and which did not express HLA antigen were activated.

[0436] In contrast, in the clones #8 and #10 in which the A*01:01 and B*07:02 alleles of 604B1 iPS cells had been knocked out, expression of the other A*24:02 and B*37:01 alleles remained. Based on this result, it was revealed that activation of NK cells co-cultured with EB-derived blood-cell-like cells differentiation-induced therefrom was inhibited.

[0437] That is, it was revealed that cells in which B2M had been knocked out were significantly attacked by NK cells, whereas cells in which some HLA alleles remained were able to avoid attack by NK cells.

### Experimental Example 28

### (Confirmation Test 1 of Pluripotency)

[0438] For 1383D2 iPS cells and 604B1 iPS cells, (1) cells in an untreated state, (2) cells immediately after being treated with 50 ng/mL IFN-γ for 48 hours, and (3) cells 5 days after being treated with 50 ng/mL IFN-γ for 48 hours were respectively prepared, and mRNA was extracted. Then, after synthesizing cDNA using Reverse Tra Ase qPCR RT Master Mix (Toyobo), quantitative PCR was performed using a primer for amplifying human NANOG cDNA specifically expressed in pluripotent stem cells, and as a control of a total amount of mRNA, a primer for amplifying human ACTB cDNA.

[0439] The primer used for amplifying human NANOG cDNA and the primer used for amplifying human ACTB cDNA are shown in Table 39.

TABLE 39

| Primer name | Base sequence | SEQ ID NO. |
|---|---|---|
| hNANOG(+4835)-fwd | CTTCACTTCCCAGGTGCAA | 66 |
| hNANOG(+4835)-rev | AGGCTAGCCAACATGAGGAA | 67 |
| hACTB-Fwd | CCAACCGCGAGAAGATGA | 68 |
| hACTB-Rev | CCAGAGGCGTACAGGGATAG | 69 |

[0440] FIG. 36 is a graph showing the results of quantitative PCR in which an expression level of the NANOG gene was measured. The expression level of the NANOG gene was shown as a relative value with an expression level of the NANOG gene relative to the ACTB gene in “untreated” 1383D2 cells being 1.

[0441] In FIG. 36, the term “untreated” indicates the results of iPS cells that were not treated with IFN-γ and cultured under normal undifferentiated condition, the term “immediately after IFN” indicates immediately after being treated with IFN-γ for 48 hours, and the term “5 days after” indicates the results of cells 5 days after being treated with IFN-γ for 48 hours.

[0442] As a result, it was revealed that an expression level of NANOG, which has been widely used as a pluripotency marker, did not decrease even when iPS cells were treated with IFN-γ for 48 hours. This result indicates that pluripotency is maintained even when iPS cells are treated with IFN-γ.

### Experimental Example 29

### (Confirmation Test 2 of Pluripotency)

[0443] (1) 604B1 iPS cells, (2) a clone #3-11 which was produced in Experimental Example 11 and in which the A*01:01, B*37:01, and C*06:02 alleles of the 604B1 iPS cells had been disrupted, (3) same clone #3-12, (4) clone #1 in which a B2M gene of 604B1 iPS cells produced in Experimental Example 18 was had been disrupted, (5) 1383D2 iPS cells, (6) clone #1 in which a B2M gene of 1383D2 iPS cells produced in Experimental Example 17 had been disrupted were respectively cultured under undifferentiated conditions, and morphology of the respective cells was observed with a phase contrast microscope.

[0444] The culture under undifferentiated conditions was carried out using an AK03N medium (StemFit, Ajinomo) as a medium and using a type “iMatrix-511” (Nippi) as a cell matrix.

[0445] FIGS. 37(a) to 37(f) are photographs of the cells of (1) to (5) respectively captured with a phase contrast microscope. A scale bar is 1 mm.

[0446] As a result, it was revealed that the HLA allele and the B2M allele were disrupted, and the IFN-γ-treated iPS cells also formed flat colonies as characteristics of undifferentiated pluripotent stem cells and proliferated. This result indicates that pluripotency is maintained even when iPS cells are treated with IFN-γ. This result also indicates that pluripotency is maintained even when the HLA allele or B2M allele of iPS cells has been disrupted.

### Experimental Example 30

### (Confirmation Test 3 of Pluripotency)

[0447] (1) 604B1 iPS cells, (2) a clone #3-11 which was produced in Experimental Example 11 and in which the A*01:01, B*37:01, and C*06:02 alleles of the 604B1 iPS cells had been disrupted, (3) same clone #3-12, (4) clone #1 in which a B2M gene of 604B1 iPS cells produced in Experimental Example 18 was had been disrupted, (5) 1383D2 iPS cells, (6) clone #1 in which a B2M gene of 1383D2 iPS cells produced in Experimental Example 17 had been disrupted were respectively cultured under conditions for inducing blood cell differentiation, and morphology of EB-derived blood-cell-like cells was observed with a phase contrast microscope.

[0448] Differentiation-induction of blood cell of iPS cells was performed as follows. First, undifferentiated iPS cells were seeded on an ultra-low adhesion culture plate (Corning), and EB (embryoid body) was formed for 2 days in an AK03N medium containing Y-27633. Subsequently, the cells were cultured for 3 days in a StemPro-34 SFM medium (Thermo Fisher Scientific) containing human bFGF (Oriental Yeast Co., Ltd.), human VEGF (R & D Systems), Insulin-Transferrin-Selenium (ITS) (Thermo Fisher Scientific Co.), GlutaMax-I (Thermo Fisher Scientific), L-ascorbic acid 2-phosphate sesquimagnesium salt hydrate (Sigma), 1-Thioglycerol (MTG, NACALAI TESQUE, INC.), and human BMP4 (R & D Systems). Thereafter, human BMP4 was removed, human SCF was added, and the cells were cultured for 2 days. Subsequently, human Flt3-Ligand (Peprotech) and human TPO (Peprotech) were added and cultured. As a result, EB-derived blood-cell-like cells were generated.

[0449] FIGS. 38(a) to 38(f) are photographs of EB-derived blood-cell-like cells of (1) to (5) on the 22nd day of induction of differentiation, which were captured with a phase contrast microscope. A scale bar is 1 mm.

[0450] As a result, it was revealed that the HLA allele and the B2M allele were disrupted, and the iPS cells treated with IFN-γ could also be able to be differentiation-induced into blood cells. This result indicates that pluripotency is maintained even when iPS cells are treated with IFN-γ. This result also indicates that pluripotency is maintained even when the HLA allele or B2M allele of iPS cells has been disrupted.

### Experimental Example 31

### (Test 5 of T Cell Cytotoxicity)

[0451] (1) Cells (clone #1) which were produced in Experimental Example 17 and in which the B2M allele of the 1383D2 iPS cells having HLA haplotypes shown in Table 40 had been knocked out, and (2) 585A1 iPS cells having HLA haplotypes shown in Table 41, were stained with CFSE (Cayman Chemical Company), and were co-cultured for 7 days with peripheral blood mononuclear cells having HLA haplotypes shown in Table 42 (PBMC, type “LP_275,” CTL).

TABLE 40
HLA haplotype of 1383D2 iPS cell

| HLA-A | | HLA-B | | HLA-C | |
|---|---|---|---|---|---|
| A*02:07 | A*32:01 | B*15:02 | B*51:01 | C*08:01 | C*14:02 |

TABLE 41
HLA haplotype of 585A1 iPS cell

| HLA-A | | HLA-B | | HLA-C | |
|---|---|---|---|---|---|
| A*24:02 | A*24:02 | B*07:02 | B*52:01 | C*07:02 | C*12:02 |

TABLE 42
HLA haplotype of PBMC (LP_275, CTL)

| HLA-A | | HLA-B | | HLA-C | |
|---|---|---|---|---|---|
| A*02:06 | A*33:03 | B*40:01 | B*58:01 | C*03:02 | C*07:02 |

[0452] After co-culture, flow cytometric analysis was performed to examine fluorescence of CFSE. FIGS. 39(a) and 39(b) are graphs showing results of flow cytometry. In FIGS. 39(a) and 39(b), “1383D2 B2M-KO #1” indicates the results of PBMC co-cultured with the 1383D2 iPS cells (clone #1) in which B2M had been knocked out, and “585A1-WT” indicates the results of PBMC co-cultured with the 585A1 iPS cells.

[0453] As a result, as shown in FIG. 39(a), no CD8-positive and CSFE-negative T cells were present in the PBMC co-cultured with the 1383D2 iPS cells (clone #1) in which B2M had been knocked out. In addition, as shown in FIG. 39(b), the PBMC co-cultured with the 585A1 iPS cells contained 24.4% of CD8-positive T cells that had been activated and became CSFE-negative. Subsequently, from the PBMC co-cultured with the 585A1 iPS cells shown in FIG. 39(b), CD8-positive and CSFE-negative cells were sorted and recovered as effector CD8-positive T cells.

[0454] Subsequently, (1) 585A1 iPS cells, (2) clone #3-1 which was produced in Experimental Example 13 and in which A*24:02 allele, B*07:02 allele, B*52:01 allele, and C*12:02 allele of 585A1 iPS cells had been knocked out, (3) the same clone #3-3, and (4) cells (not subcloned bulk cells) produced in Experimental Example 46 to be described later and in which the B2M allele of 585A1 iPS cells had been knocked out, were respectively differentiation-induced into EB-derived blood-cell-like cells. The EB-derived blood-cell-like cells include blood cells.

[0455] Subsequently, the recovered effector CD8-positive T cells were added to the medium of each EB-derived blood-cell-like cell at various ratios to examine whether each EB-derived blood-cell-like cell was attacked. That is, target cells were EB-derived blood-cell-like cells that had been differentiation-induced from the cells of (1) to (4). A ratio of the number of CD8-positive T cells to be added as effectors was 0.625, 1.25, 2.5, 5, 10, and 20 with respect to EB-derived blood-cell-like cells 1.

[0456] FIG. 39(c) is a graph showing a ratio of each EB-derived blood-cell-like cell damaged and lysed. In FIG. 39(c), the symbol “**” indicates that there is a significant difference at P<0.01, “WT” indicates the results of EB-derived blood-cell-like cells differentiation-induced from the 585A1 iPS cells of (1), “C7 #3-1” indicates the results of the EB-derived blood-cell-like cells differentiation-induced from the clone #3-1 of (2), “C7 #3-3” indicates the results of the EB-derived blood-cell-like cells differentiation-induced from the clone #3-3 of (3), and “B2M-” indicates the results of the EB-derived blood-cell-like cells differentiation-induced from cells in which the B2M allele of the 585A1 iPS cells of (4) had been knocked out.

[0457] As a result, it was revealed that the EB-derived blood-cell-like cells differentiation-induced from the 585A1 iPS cells had a higher degree of injury when a proportion of CD8-positive T cells as effectors was increased.

[0458] In contrast, it was clarified that EB-derived blood-cell-like cells differentiation-induced from the clones #3-1 and #3-3 in which the A*24:02 allele, B*07:02 allele, B*52:01 allele, and C*12:02 allele of the 585A1 iPS cells were knocked out; and the EB-derived blood-cell-like cells differentiation-induced from cells in which the B2M allele of the 585A1 iPS cells were knocked out, were not damaged even when a proportion of CD8-positive T cells as effectors was increased.

[0459] These results further support that it is possible to reduce a rejection reaction in a case where cells were differentiation-induced and allogeneically transplanted by disrupting the HLA allele of iPS cells.

### Experimental Example 32

(Test 6 of T cell cytotoxicity)

[0460] (1) Cells (clone #1) which were produced in Experimental Example 17 and in which the B2M allele of the 1383D2 iPS cells having HLA haplotypes shown in Table 43 had been knocked out, and (2) 585A1 iPS cells having HLA haplotypes shown in Table 44, were co-cultured for 7 days with cells obtained by staining, with CFSE (Cayman Chemical Company), peripheral blood mononuclear cells having HLA haplotypes shown in Table 45 (PBMC, type “LP_329,” CTL).

TABLE 43
HLA haplotype of 1383D2 iPS cell

| HLA-A | | HLA-B | | HLA-C | |
|---|---|---|---|---|---|
| A*02:07 | A*32:01 | B*15:02 | B*51:01 | C*08:01 | C*14:02 |

TABLE 44
HLA haplotype of 585A1 iPS cell

| HLA-A | | HLA-B | | HLA-C | |
|---|---|---|---|---|---|
| A*24:02 | A*24:02 | B*07:02 | B*52:01 | C*07:02 | C*12:02 |

TABLE 45
HLA haplotype of PBMC (LP_329, CTL)

| HLA-A | | HLA-B | | HLA-C | |
|---|---|---|---|---|---|
| A*29:02 | A*68:01 | B*39:06 | B*40:02 | C*03:05 | C*07:02 |

[0461] After co-culture, flow cytometric analysis was performed to examine fluorescence of CFSE. FIGS. 40(a) and 40(b) are graphs showing results of flow cytometry. In FIGS. 40(a) and 40(b), “1383D2 B2M-KO #1” indicates the results of PBMC co-cultured with the 1383D2 iPS cells (clone #1) in which B2M had been knocked out, and “585A1-WT” indicates the results of PBMC co-cultured with the 585A1 iPS cells.

[0462] As a result, as shown in FIG. 40(a), no CD8-positive and CSFE-negative T cells were present in the PBMC co-cultured with the 1383D2 iPS cells (clone #1) in which B2M had been knocked out. In addition, as shown in FIG. 40(b), the PBMC co-cultured with the 585A1 iPS cells contained 11.7% of CD8-positive T cells that had been activated and became CSFE-negative. Subsequently, from the PBMC co-cultured with the 585A1 iPS cells shown in FIG. 40(b), CD8-positive and CSFE-negative cells were sorted and recovered as effector CD8-positive T cells.

[0463] Subsequently, (1) 585A1 iPS cells, (2) clone #3-1 which was produced in Experimental Example 13 and in which A*24:02 allele, B*07:02 allele, B*52:01 allele, and C*12:02 allele of 585A1 iPS cells had been knocked out, (3) the same clone #3-3, and (4) cells (not subcloned bulk cells) produced in Experimental Example 46 to be described later and in which the B2M allele of 585A1 iPS cells had been knocked out, were respectively differentiation-induced into EB-derived blood-cell-like cells. The EB-derived blood-cell-like cells include blood cells.

[0464] Subsequently, the recovered effector CD8-positive T cells were added to the medium of each EB-derived blood-cell-like cell at various ratios to examine whether each EB-derived blood-cell-like cell was attacked. That is, target cells were EB-derived blood-cell-like cells that had been differentiation-induced from the cells of (1) to (4). A ratio of the number of CD8-positive T cells to be added as effectors was 0.625, 1.25, 2.5, 5, 10, and 20 with respect to EB-derived blood-cell-like cells 1.

[0465] FIG. 40(c) is a graph showing a ratio of each EB-derived blood-cell-like cell damaged and lysed. In FIG. 40(c), the symbol “**” indicates that there is a significant difference at P<0.01, “WT” indicates the results of EB-derived blood-cell-like cells differentiation-induced from the 585A1 iPS cells of (1), “C7 #3-1” indicates the results of the EB-derived blood-cell-like cells differentiation-induced from the clone #3-1 of (2), “C7 #3-3” indicates the results of the EB-derived blood-cell-like cells differentiation-induced from the clone #3-3 of (3), and “B2M” indicates the results of the EB-derived blood-cell-like cells differentiation-induced from cells in which the B2M allele of the 585A1 iPS cells of (4) had been knocked out.

[0466] As a result, it was revealed that the EB-derived blood-cell-like cells differentiation-induced from the 585A1 iPS cells had a higher degree of injury when a proportion of CD8-positive T cells as effectors was increased.

[0467] In contrast, it was clarified that EB-derived blood-cell-like cells differentiation-induced from the clones #3-1 and #3-3 in which the A*24:02 allele, B*07:02 allele, B*52:01 allele, and C*12:02 allele of the 585A1 iPS cells were knocked out; and the EB-derived blood-cell-like cells differentiation-induced from cells in which the B2M allele of the 1383D2 iPS cells were knocked out, were not damaged even when a proportion of CD8-positive T cells as effectors was increased.

[0468] These results further support that it is possible to reduce a rejection reaction in a case where cells were differentiation-induced and allogeneically transplanted by disrupting the HLA allele of iPS cells.

### Experimental Example 33

### (Cell Transplantation Experiment 1)

[0469] (1) 585A1 iPS cells, and (2) the clone #3-1 which was produced in Experimental Example 13 and in which the A*24:02 allele, B*07:02 allele, B*52:01 allele, and C*12:02 allele of the 585A1 iPS cells were knocked out, were respectively differentiation-induced into EB-derived blood-cell-like cells. Subsequently, the respective EB-derived blood-cell-like cells were labeled with luciferase.

[0470] Subsequently, one hour before the start of the experiment, each of the cell was transplanted into immunodeficient mice (NOD.Cg-Rag1^{tm1Mom}Il2rg^{tm1Wjl}/SzJ (NRG), The Jackson Laboratory) by intraperitoneal administration. Subsequently, at the start of the experiment, effector CD8-positive T cells which were prepared in the same manner as in Experimental Example 32 and were derived from peripheral blood mononuclear cells (PBMC, type “LP_329,” CTL) or a medium (control) were further intraperitoneally administered.

[0471] Then, at the time of cell transplantation (before T cell injection), 5 hours, 1 day, 3 days, and 7 days after the start of the experiment, luciferin, which is a substrate of luciferase, was administered to each mouse. Using an IVIS imaging system (trade name “IVIS Spectrum,” SPI), fluorescence of the EB-derived blood-cell-like cells labeled with luciferase was captured, and a survival rate of the transplanted cells was measured.

[0472] FIG. 41(a) is a diagram illustrating an experimental schedule. Furthermore, FIG. 41(b) shows a photograph showing results of capturing fluorescence of EB-derived blood-cell-like cells in each mouse. Furthermore, FIG. 41(c) is graph of a relative survival curve showing the results of calculating a survival rate of each EB-derived blood-cell-like cell in a case where the effector CD8-positive T cells were administered to the mouse, with a fluorescence intensity before T cell injection being 100%.

[0473] In FIGS. 41(b) and 41(c), “WT” indicates the results of EB-derived blood-cell-like cells differentiation-induced from the 585A1 iPS cells of (1), “C7 #3-1” indicates the results of EB-derived blood-cell-like cells differentiation-induced from the clone #3-1 of (2), “Mock” indicates the results of administration of the medium as a control, and “T cell” indicates the results of administration of the effector CD8-positive T cells derived from peripheral blood mononuclear cells (PBMC, type “LP_329,” CTL).

[0474] As a result, as shown in FIG. 41(c), it was confirmed that the EB-derived blood-cell-like cells differentiation-induced from 585A1 iPS cells had a reduced survival rate after administration of the effector CD8-positive T cells. On the other hand, it became clear that the EB-derived blood-cell-like cells differentiation-induced from the clone #3-1 in which the A*24:02 allele, B*07:02 allele, B*52:01 allele, and C*12:02 allele of 585A1 iPS cells were knocked out maintained a high survival rate even after the administration of the effector CD8-positive T cells.

[0475] These results further support that it is possible to reduce a rejection reaction in a case where cells were differentiation-induced and allogeneically transplanted by disrupting the HLA allele of iPS cells.

### Experimental Example 34

### (Reactivity Test 2 of NK Cells)

[0476] (1) 585A1 iPS cells, (2) clone #3-1 which was produced in Experimental Example 13 and in which A*24:02 allele, B*07:02 allele, B*52:01 allele, and C*12:02 allele of 585A1 iPS cells had been knocked out, and (3) cells (not subcloned bulk cells) produced in Experimental Example 46 to be described later and in which the B2M allele of 585A1 iPS cells had been knocked out, were prepared. Table 46 shows HLA haplotypes of 585A1 iPS cells, and Table 47 shows HLA haplotypes of 1383D2 iPS cells.

TABLE 46
HLA haplotype of 585A1 iPS cell

| HLA-A | | HLA-B | | HLA-C | |
|---|---|---|---|---|---|
| A*24:02 | A*24:02 | B*07:02 | B*52:01 | C*07:02 | C*12:02 |

TABLE 47
HLA haplotype of 1383D2 iPS cell

| HLA-A | | HLA-B | | HLA-C | |
|---|---|---|---|---|---|
| A*02:07 | A*32:01 | B*15:02 | B*51:01 | C*08:01 | C*14:02 |

[0477] In addition, CD56-positive cells (NK cells) were recovered from PBMC having an HLA haplotype shown in Table 48 (type “LP_275,” CTL) by sorting. Subsequently, the recovered NK cells were co-cultured with each of cells of (1) to (3) in the presence of the anti-CD107a antibody. As a result, when the NK cells were activated, they became CD107a-positive. After co-culture, flow cytometric analysis was performed to measure a percentage of activated NK cells.

TABLE 48
HLA haplotype of PBMC (LP_275, CTL)

| HLA-A | | HLA-B | | HLA-C | |
|---|---|---|---|---|---|
| A*02:06 | A*33:03 | B*40:01 | B*58:01 | C*03:02 | C*07:02 |

[0478] FIG. 42(a) is a graph showing results of flow cytometric analysis. In FIG. 42(a), the symbol “**” indicates that there is a significant difference at P<0.01, “WT” indicates the results of the 585A1 iPS cells of (1), “C7 #3-1” indicates the results of the clone #3-1 of (2), and “B2M-” indicates the results of the cells in which the B2M allele of the 585A1 iPS cells of (3) had been knocked out.

[0479] As a result, it was revealed that the 585A1 iPS cells and the clone #3-1 were able to significantly inhibit activation of NK cells, as compared to cells in which the B2M allele was knocked out. Then, NK cells activated with cells in which the B2M allele was knocked out were sorted and recovered.

[0480] Subsequently, for (4) K562 cells known not to express HLA antigen; (5) cells which were produced in Experimental Example 46 to be described later and in which B2M allele of 585A1 iPS cells was knocked out (not subcloned bulk cells); (6) cells which were produced in Experimental Example 47 to be described later and in which the HLA-A allele, HLA-B allele, and HLA-C allele of 585A1 iPS cells were knocked out (where clones #3-5, HLA-E, HLA-F, and HLA-G alleles remained); (7) the clone #3-1 which was produced in Experimental Example 13 and in which the A*24:02 allele, B*07:02 allele, B*52:01 allele, and C*12:02 allele of 585A1 iPS cells were knocked out; (8) the same clone #3-3; (9) cells which were produced in Experimental Example 13 and in which the HLA-A and HLA-B alleles of the 585A1 iPS cells were knocked out (where clone #3, HLA-C, HLA-E, HLA-F, and HLA-G alleles remained); and (10) 585A1 iPS cells, activated NK cells were added to each of cells at various ratios, and a 51Cr release assay was performed.

[0481] That is, the above-mentioned activated NK cells were used as effector cells, and the above-mentioned cells of (4) to (10) were used as target cells. A percentage of the number of NK cells to be added was 0.33, 1, and 3 with respect to the target cells 1.

[0482] FIG. 42(b) is a graph showing a ratio of the cells of (4) to (10) described above that were damaged and lysed. In FIG. 42(b), the symbol “*” indicates that there is a significant difference at P<0.05, the symbol “**” indicates that there is a significant difference at P<0.01, “K562” indicates the results of the K562 cells of (4), “B2M-” indicates the results of cells in which the B2M allele of the 585A1 iPS cell of (5) was knocked out, “A⁻B⁻C⁻#5” indicates the results of the cells (clone #3-5) in which the HLA-A allele, HLA-B allele, and HLA-C allele of (6) were knocked out, “C7 #3-1” indicates the results of the clone #3-1 of (7), “C7 #3-3” indicates the results of the clone #3-3 of (8), “A⁻B⁻#3” indicates the results of the cells (clone #3) in which the HLA-A allele and the HLA-B allele of (9) were knocked out, and “585A1-WT” indicates the results of the 585A1 iPS cells of (10).

[0483] As a result, it was revealed that the cells in which the HLA-C allele remained could significantly avoided attack by NK cells, as compared to cells in which B2M was knocked out, and cells in which the HLA-A allele, HLA-B allele, and HLA-C alleles were knocked out.

### Experimental Example 35

### (Reactivity Test 3 of NK Cells)

[0484] (1) 585A1 iPS cells, (2) clone #3-1 which was produced in Experimental Example 13 and in which A*24:02 allele, B*07:02 allele, B*52:01 allele, and C*12:02 allele of 585A1 iPS cells had been knocked out, and (3) cells (not subcloned bulk cells) produced in Experimental Example 46 to be described later and in which the B2M allele of 585A1 iPS cells had been knocked out, were prepared. Table 49 shows HLA haplotypes of 585A1 iPS cells, and Table 50 shows HLA haplotypes of 1383D2 iPS cells.

TABLE 49
HLA haplotype of 585A1 iPS cell

| HLA-A | | HLA-B | | HLA-C | |
|---|---|---|---|---|---|
| A*24:02 | A*24:02 | B*07:02 | B*52:01 | C*07:02 | C*12:02 |

TABLE 50
HLA haplotype of 1383D2 iPS cell

| HLA-A | | HLA-B | | HLA-C | |
|---|---|---|---|---|---|
| A*02:07 | A*32:01 | B*15:02 | B*51:01 | C*08:01 | C*14:02 |

[0485] In addition, CD3-negative and CD56-positive cells (NK cells) were recovered from PBMC having an HLA haplotype shown in Table 51 (type “LP_329,” CTL) by sorting. Subsequently, the recovered NK cells were co-cultured with each of cells of (1) to (3) in the presence of the anti-CD107a antibody. As a result, when the NK cells were activated, they became CD107a-positive. After co-culture, flow cytometric analysis was performed to measure a percentage of activated NK cells.

TABLE 51
HLA haplotype of PBMC (LP_329, CTL)

| HLA-A | | HLA-B | | HLA-C | |
|---|---|---|---|---|---|
| A*29:02 | A*68:01 | B*39:06 | B*40:02 | C*03:05 | C*07:02 |

[0486] FIG. 43(a) is a graph showing results of flow cytometric analysis. In FIG. 43(a), the symbol “**” indicates that there is a significant difference at P<0.01, “WT” indicates the results of the 585A1 iPS cells of (1), “C7 #3-1” indicates the results of the clone #3-1 of (2), and “B2M” indicates the results of the cells in which the B2M allele of the 585A1 iPS cells of (3) had been knocked out.

[0487] As a result, it was revealed that the 585A1 iPS cells and the clone #3-1 were able to significantly inhibit activation of NK cells, as compared to cells in which the B2M allele was knocked out. Then, NK cells activated with cells in which the B2M allele was knocked out were sorted and recovered.

[0488] Subsequently, for (4) K562 cells known not to express HLA antigen; (5) cells which were produced in Experimental Example 46 to be described later and in which B2M allele of 585A1 iPS cells was knocked out (not subcloned bulk cells); (6) cells which were produced in Experimental Example 47 to be described later and in which the HLA-A allele, HLA-B allele, and HLA-C allele of 585A1 iPS cells were knocked out (where clones #3-5, HLA-E, HLA-F, and HLA-G alleles remained); (7) the clone #3-1 which was produced in Experimental Example 13 and in which the A*24:02 allele, B*07:02 allele, B*52:01 allele, and C*12:02 allele of 585A1 iPS cells were knocked out; (8) the same clone #3-3; (9) cells which were produced in Experimental Example 13 and in which the HLA-A and HLA-B alleles of the 585A1 iPS cells were knocked out (where clone #3, HLA-C, HLA-E, HLA-F, and HLA-G alleles remained); and (10) 585A1 iPS cells, activated NK cells were added to each of cells at various ratios, and a 51Cr release assay was performed.

[0489] That is, the above-mentioned activated NK cells were used as effector cells, and the above-mentioned cells of (4) to (10) were used as target cells. A percentage of the number of NK cells to be added was 0.33, 1, and 3 with respect to the target cells 1.

[0490] FIG. 43(b) is a graph showing a ratio of the cells of (4) to (10) described above that were damaged and lysed. In FIG. 43(b), the symbol “**” indicates that there is a significant difference at P<0.01, “K562” indicates the results of the K562 cells of (4), “B2M-” indicates the results of cells in which the B2M allele of the 585A1 iPS cell of (5) was knocked out, “A⁻B⁻C⁻#5” indicates the results of the cells (clone #5) in which the HLA-A allele, HLA-B allele, and HLA-C allele of (6) were knocked out, “C7 #3-1” indicates the results of the clone #3-1 of (7), “C7 #3-3” indicates the results of the clone #3-3 of (8), “A⁻B⁻#3” indicates the results of the cells (clone #3) in which the HLA-A allele and the HLA-B allele of (9) were knocked out, and “585A1-WT” indicates the results of the 585A1 iPS cells of (10).

[0491] As a result, it was revealed that the cells in which the HLA-C allele remained could significantly avoided attack by NK cells, as compared to cells in which B2M was knocked out, and cells in which the HLA-A allele, HLA-B allele, and HLA-C alleles were knocked out.

### Experimental Example 36

### (Reactivity Test 4 of NK Cells)

[0492] (1) 585A1 iPS cells, (2) clone #3-1 which was produced in Experimental Example 13 and in which A*24:02 allele, B*07:02 allele, B*52:01 allele, and C*12:02 allele of 585A1 iPS cells had been knocked out, (3) cells (not subcloned bulk cells) produced in Experimental Example 46 to be described later and in which the B2M allele of 585A1 iPS cells had been knocked out, and (4) K562 cells known not to express HLA antigen, were prepared. Table 52 shows HLA haplotypes of 585A1 iPS cells, and Table 53 shows HLA haplotypes of 1383D2 iPS cells.

TABLE 52
HLA haplotype of 585A1 iPS cell

| HLA-A | | HLA-B | | HLA-C | |
|---|---|---|---|---|---|
| A*24:02 | A*24:02 | B*07:02 | B*52:01 | C*07:02 | C*12:02 |

TABLE 53
HLA haplotype of 1383D2 iPS cell

| HLA-A | | HLA-B | | HLA-C | |
|---|---|---|---|---|---|
| A*02:07 | A*32:01 | B*15:02 | B*51:01 | C*08:01 | C*14:02 |

[0493] In addition, CD3-negative and CD56-positive cells (NK cells) were respectively recovered from PBMC having HLA haplotypes shown in Table 54 (type “LP_118,” CTL) and PBMC having HLA haplotypes shown in Table 55 (type “LP_266,” CTL) by sorting. Subsequently, the recovered NK cells were co-cultured with each of cells of (1) to (4) in the presence of the anti-CD107a antibody. As a result, when the NK cells were activated, they became CD107a-positive. After co-culture, flow cytometric analysis was performed to measure a percentage of activated NK cells.

TABLE 54
HLA haplotype of PBMC (LP_118, CTL)

| HLA-A | | HLA-B | | HLA-C | |
|---|---|---|---|---|---|
| A*03:01 | A*24:02 | B*07:02 | B*35:01 | C*07:02 | C*07:02 |

TABLE 55
HLA haplotype of PBMC (LP_266, CTL)

| HLA-A | | HLA-B | | HLA-C | |
|---|---|---|---|---|---|
| A*03:01 | A*24:02 | B*07:02 | B*40:02 | C*03:05 | C*07:02 |

[0494] FIG. 44(a) and FIG. 44(b) are graphs showing results of flow cytometric analysis. FIG. 44(a) shows the results of NK cells derived from PBMC having HLA haplotypes shown in Table 54 (type “LP_118,” CTL), and FIG. 44(b) shows the results of NK cells derived from PBMC having HLA haplotypes shown in Table 55 (type “LP_266,” CTL). In FIGS. 44(a) and 44(b), the symbol “**” indicates that there is a significant difference at P<0.01, “WT” indicates the results of the 585A1 iPS cells of (1), “C7 #3-1” indicates the results of the clone #3-1 of (2), “B2M” indicates the results of the cells in which the B2M allele of the 585A1 iPS cells of (3) had been knocked out, and “K562” indicates the results of the K562 cells of (4).

[0495] As a result, it was revealed that the 585A1 iPS cells and the clone #3-1 were able to significantly inhibit activation of NK cells, as compared to cells in which the B2M allele was knocked out.

### Experimental Example 37

### (Cell Transplantation Experiment 2)

[0496] (1) Cells in which a B2M gene of 585A1 iPS cell was knocked out, and (2) the clone #3-1 which was produced in Experimental Example 13 and in which the A*24:02 allele, B*07:02 allele, B*52:01 allele, and C*12:02 allele of the 585A1 iPS cells were knocked out, were respectively differentiation-induced into EB-derived blood-cell-like cells. Subsequently, the respective EB-derived blood-cell-like cells were labeled with luciferase.

[0497] Subsequently, one hour before the start of the experiment, each of the cell was transplanted into immunodeficient mice (NOD.Cg-Rag1^{tm1Mom}Il2rg^{tm1Wjl}/SzJ (NRG), The Jackson Laboratory) by intraperitoneal administration. Subsequently, at the start of the experiment, activated NK cells which were prepared in the same manner as in Experimental Examples 34 and 35 and were derived from peripheral blood mononuclear cells (PBMC, type “LP_329,” CTL) or a medium (control) were further intraperitoneally administered. Table 56 shows HLA haplotypes of PBMC (type “LP_329,” CTL).

TABLE 56
HLA haplotype of PBMC (LP_329, CTL)

| HLA-A | | HLA-B | | HLA-C | |
|---|---|---|---|---|---|
| A*29:02 | A*68:01 | B*39:06 | B*40:02 | C*03:05 | C*07:02 |

[0498] Then, at the time of cell transplantation (before NK cells injection), 5 hours, 1 day, 3 days, 5 days, and 7 days after the start of the experiment, luciferin, which is a substrate of luciferase, was administered to each mouse. Using an IVIS imaging system (trade name “IVIS Spectrum,” SPI), fluorescence of the EB-derived blood-cell-like cells labeled with luciferase was captured, and a survival rate of the transplanted cells was measured.

[0499] FIG. 45(a) is a diagram illustrating an experimental schedule. Furthermore, FIG. 45(b) shows a photograph showing results of capturing fluorescence of EB-derived blood-cell-like cells in each mouse. Furthermore, FIG. 45(c) is graph showing the results of calculating a survival rate of each EB-derived blood-cell-like cell in a case where the NK cells were administered to the mouse, with a fluorescence intensity before NK cell injection being 100%, and furthermore, calculating a relative survival rate at each measurement time by Formula (F1). In FIG. 45(c), a unit of a vertical axis is (%).

Relative survival rate (%)=survival rate (%) of NK cell administration group/survival rate (%) of control group×100 (F1)

[0500] In FIGS. 45(b) and 45(c), “B2M” indicates the results of EB-derived blood-cell-like cells differentiation-induced from cells in which a B2M gene of the 585A1 iPS cells of (1) was knocked out, “C7 #3-1” indicates the results of EB-derived blood-cell-like cells differentiation-induced from the clone #3-1 of (2), “Mock” indicates the results of administration of the medium as a control, and “NK cell” indicates the results of administration of the activated NK cells derived from peripheral blood mononuclear cells (PBMC, type “LP_329,” CTL).

[0501] As a result, as shown in FIG. 45(c), it was confirmed that the EB-derived blood-cell-like cells differentiation-induced from the cells in which a B2M gene was knocked out had a reduced survival rate after administration of the NK cells. On the other hand, it was recognized that the EB-derived blood-cell-like cells differentiation-induced from the clone #3-1 tended to maintain a higher survival rate even after administration of activated NK cells.

[0502] These results further support that by partially leaving the HLA allele, it is possible to reduce the attack by NK cells in the case of allogeneic transplantation.

### Experimental Example 38

### (Cytotoxicity Test Using T Cells and NK Cells)

[0503] (1) 585A1 iPS cells, (2) clone #3-1 which was produced in Experimental Example 13 and in which A*24:02 allele, B*07:02 allele, B*52:01 allele, and C*12:02 allele of 585A1 iPS cells had been knocked out, and (3) cells (not subcloned bulk cells) produced in Experimental Example 46 to be described later and in which the B2M allele of 585A1 iPS cells had been knocked out, were respectively differentiation-induced into EB-derived blood-cell-like cells.

[0504] Subsequently, in a medium for each of the EB-derived blood-cell-like cells and at various proportions, effector CD8-positive T cells recovered by sorting from peripheral blood mononuclear cells (PBMC, type “LP_275,” CTL) were added in the same manner as in Experimental Example 31, and activated NK cells recovered by sorting from PBMC (type “LP_275,” CTL) were added in the same manner as in Experimental Example 34, and a ⁵¹Cr release assay was performed.

[0505] That is, target cells were EB-derived blood-cell-like cells that had been differentiation-induced from the cells of (1) to (3), and the effector cells were the above-mentioned CD8-positive T cells and activated NK cells. A ratio of the number of CD8-positive T cells to be added as effectors was 1, 3, and 9 with respect to EB-derived blood-cell-like cells 1. In addition, a ratio of the number of activated NK cells to be added was 0.33, 1, and 3 with respect to EB-derived blood-cell-like cells 1.

[0506] FIG. 46 is a graph showing a ratio of each EB-derived blood-cell-like cell damaged and lysed. In FIG. 46, the symbol “*” indicates that there is a significant difference at P<0.05, the symbol “**” indicates that there is a significant difference at P<0.01, “WT” indicates the results of EB-derived blood-cell-like cells differentiation-induced from the 585A1 iPS cells of (1), “C7 #3-1” indicates the results of the EB-derived blood-cell-like cells differentiation-induced from the clone #3-1 of (2), and “B2M⁻” indicates the results of the EB-derived blood-cell-like cells differentiation-induced from cells in which the B2M allele of the 585A1 iPS cells of (3) had been knocked out.

[0507] As a result, it was confirmed that when EB-derived blood-cell-like cells were mixed alone with the effector CD8-positive T cells, only EB-derived blood-cell-like cells that were differentiation-induced from 585A1 iPS cells were damaged.

[0508] In addition, it was confirmed that when each of the EB-derived blood-cell-like cells was mixed with the activated NK cell alone, only the EB-derived blood-cell-like cell differentiation-induced from the cells in which the B2M allele was knocked out, was damaged.

[0509] In addition, it was revealed that when each of the effector CD8-positive T cells and the activated NK cells are mixed with each of the EB-derived blood-cell-like cells, both EB-derived blood-cell-like cells differentiation-induced from 585A1 iPS cells and EB-derived blood-cell-like cells differentiation-induced from cells in which the B2M allele was knocked out were damaged, but a degree of damage was significantly suppressed in the EB-derived blood-cell-like cells that were differentiation-induced from C7 #3-1 cells.

[0510] These results indicate that damage caused by both the effector CD8-positive T cells and the activated NK cells can be reduced by disrupting an HLA allele present in donor cells but not present in recipient cells and by leaving HLA alleles matching in the donor cells and the recipient cells.

### Experimental Example 39

### (Production of CIITA Gene Knockout iPS Cell)

[0511] A CIITA gene is a gene encoding a Class II Major Histocompatibility Complex Transactivator protein. As described above, expression of the CIITA gene is known to be essential for expression of class II HLA protein.

[0512] A CIITA gene of the clone #3-1 (hereinafter, may be referred to as “585A1-C7 residual cells”), which was produced in Experimental Example 13 and in which the A*24:02 allele, B*07:02 allele, B*52:01 allele, and C*12:02 allele of 585A1 iPS cells were knocked out, was knocked out.

[0513] FIG. 47(a) is a table showing 585A1-C7 residual cells and an HLA haplotype of the 585A1-C7 residual cells in which a CIITA gene was knocked out. By knocking out the CIITA gene, class II HLA proteins such as HLA-DP, HLA-DQ, and HLA-DR can be deleted.

[0514] Specifically, the 585A1-C7 residual cells were transfected with a purified Cas9 protein together with CIITA-ex3g5 that is an sgRNA that cleaves a CIITA allele (where a target base sequence is set forth in SEQ ID NO: 8017), and subclones of 28 strains were obtained. A commercially available kit (trade name “4D-Nucleofector,” model “V4XP-4032,” Lonza) was used for transfection.

[0515] Then, a base sequence of the CIITA allele of the genome of each subclone was analyzed. FIG. 47(b) is a table showing a base mutation pattern of each subclone. In FIG. 47(b), “Clone ID” indicates the subclone name, “WT” indicates that it was a wild-type base sequence, “−” had a deletion mutation, and “+” indicates that it had an insertion mutation.

[0516] As a result, as shown in FIG. 47(b), it was confirmed that a deletion mutation or an insertion mutation was introduced into at least one of CIITA alleles in 15 strains among subclones of 28 strains. In FIG. 47(c), a base sequence of clone #3-1-3 is shown as a representative example.

### Experimental Example 40

### (Test of CD4-Positive T Cell Activation)

[0517] CD4-positive T cells were recovered from peripheral blood mononuclear cells (PBMC) derived from healthy volunteer #21 by sorting, and were stained with CFSE (Cayman Chemical Co.).

[0518] Subsequently, the above CD4-positive T cells were mixed and co-cultured for 1 week with (1) 585A1 iPS cells, (2) clone #3-1 which was produced in Experimental Example 13 and in which A*24:02 allele, B*07:02 allele, B*52:01 allele, and C*12:02 allele of 585A1 iPS cells had been knocked out (hereinafter, also referred to as “585A1-C7 residual cells”), and (3) the cells which were produced in Experimental Example 39 and in which a CIITA gene of 585A1-C7 residual cells was knocked out (clone #3-1-3). In addition, for comparison, a group in which the above-mentioned CD4-positive T cells of (4) were cultured alone for 1 week was prepared.

[0519] After co-culture, flow cytometric analysis was performed to examine fluorescence of CFSE. FIGS. 48(a) to 48(d) are graphs showing results of flow cytometry. In FIGS. 48(a) to 48(d), “Mock” indicates the results of culturing only the CD4-positive T cells of (4), “585A1-WT” indicates the results of 585A1 iPS cells of (1), “585A1-C7 #3-1” indicates the results of the 585A1-C7 residual cells of (2), and “585A1-C7+CIITA⁻#3-1-3” indicates the results of the cells (clone #3-1-3) in which the CIITA gene of the 585A1-C7 residual cells of (3) was knocked out.

[0520] As a result, as shown in FIG. 48(a), it was revealed that the CD4-positive T cells were not activated even when only the CD4-positive T cells were cultured alone.

[0521] Furthermore, as shown in FIG. 48(b), it became clear that when the CD4-positive T cells derived from healthy volunteer #21 and the 585A1 iPS cells were co-cultured, 45.6% of the CD4-positive T cells were activated and became CFSE-negative.

[0522] Furthermore, as shown in FIG. 48(c), it became clear that when the CD4-positive T cells derived from healthy volunteer #21 and the 585A1-C7 residual cells were co-cultured, 49.2% of the CD4-positive T cells were activated and became CFSE-negative.

[0523] Furthermore, as shown in FIG. 48(d), it became clear that even when the CD4-positive T cells derived from healthy volunteer #21 and the cells (clone #3-1-3) in which the CIITA gene of 585A1-C7 residual cells was knocked out were co-cultured, the CD4-positive T cells were not activated.

### Experimental Example 41

### (Test of Activation of CD4-Positive T Cells, CD8-Positive T Cells, and NK Cells)

[0524] Peripheral blood mononuclear cells (PBMC, type “LP_329,” CTL) were stained with CFSE (Cayman Chemical). Table 57 shows HLA haplotypes of PBMC (type “LP_329,” CTL).

TABLE 57
HLA haplotype of PBMC (LP_329, CTL)

| HLA-A | | HLA-B | | HLA-C | |
|---|---|---|---|---|---|
| A*29:02 | A*68:01 | B*39:06 | B*40:02 | C*03:05 | C*07:02 |

[0525] Subsequently, the above PBMC was mixed and co-cultured for 1 week with (1) 585A1 iPS cells, (2) clone #3-1 which was produced in Experimental Example 13 and in which A*24:02 allele, B*07:02 allele, B*52:01 allele, and C*12:02 allele of 585A1 iPS cells had been knocked out (hereinafter, also referred to as “585A1-C7 residual cells”), (3) the cells which were produced in Experimental Example 39 and in which a CIITA gene of 585A1-C7 residual cells was knocked out (clone #3-1-3), (4) EB-derived blood-cell-like cells differentiated from each cell of the clone #3-1-6, and (5) K562 cells known not to express HLA antigen. In addition, for comparison, a group in which the above-mentioned PBMC of (6) were cultured alone for 1 week was prepared.

[0526] After co-culture, flow cytometric analysis was performed to examine fluorescence of CFSE. FIGS. 49(a) to 49(c) are graphs showing results of flow cytometry. In FIGS. 49(a) to 49(c), “Mock” indicates the results of culturing only PBMC of (6) alone; “585A1-WT” indicates the results of EB-derived blood-cell-like cells differentiation-induced from the 585A1 iPS cells of (1); “585A1-C7 #3-1” indicates the results of EB-derived blood-cell-like cells differentiation-induced from the 585A1-C7 residual cells of (2); “585A1-C7+CIITA #3-1-3” indicates the results of EB-derived blood-cell-like cells differentiation-induced from the cells (clone #3-1-3) in which the CIITA gene of the 585A1-C7 residual cells of (3) was knocked out; “585A1-C7+CIITA #3-1-6” indicates the results of EB-derived blood-cell-like cells differentiation-induced from the cells (clone #3-1-6) in which the CIITA gene of the 585A1-C7 residual cells of (4) was knocked out; and “K562” indicates the results of the K562 cells of (5).

[0527] As a result, as shown in FIG. 49(a), it became clear that the CD8-positive T cells reacted with the EB-derived blood-cell-like cells differentiation-induced from the 585A1 iPS cells, and 51.0% of the CD8-positive T cells were activated and became CFSE-negative. On the other hand, it was revealed that even when the CD8-positive T cells were co-cultured with cells other than the EB-derived blood-cell-like cells differentiation-induced from 585A1 iPS cells, only 2% or less of the CD8-positive T cells were activated.

[0528] Furthermore, as shown in FIG. 49(b), it became clear that the CD4-positive T cells reacted with the EB-derived blood-cell-like cells differentiation-induced from 585A1 iPS cells and the EB-derived blood-cell-like cells differentiation-induced from 585A1-C7 residual cells, and for each of the cases, 49.2% and 26.7% of the CD4-positive T cells were activated and became CFSE-negative. On the other hand, it was revealed that even when the CD4-positive T cells were co-cultured with other cells, only 2% or less of the CD4-positive T cells were activated.

[0529] Furthermore, as shown in FIG. 49(c), it was revealed that the NK cells reacted with the K562 cells, and 79.2% of the NK cells were activated and became CFSE-negative. On the other hand, it was revealed that even when the NK cells were co-cultured with other cells, only 7% or less of the NK cells were activated.

### Experimental Example 42

(Production of iPS Cells with Residual HLA-C7 and Deficient CIITA)

[0530] An HLA-A allele, an HLA-B allele, and a CIITA allele were knocked out from iPS stock cells (Ff-Xt-28s05 iPS cells) which has the third most frequent HLA allele among Japanese homozygously. Knockout was performed by one-stage genome editing and two-stage genome editing. Table 58 shows HLA haplotypes of Ff-Xt-28s05 iPS cells.

TABLE 58
HLA haplotype of Ff-Xt-28s05 iPS cells

| HLA-A | | HLA-B | | HLA-C | |
|---|---|---|---|---|---|
| A*24:02 | A*24:02 | B*07:02 | B*07:02 | C*07:02 | C*07:02 |

[0531] FIGS. 50(a) to 50(c) are diagrams illustrating a procedure of the present experimental example. FIG. 50(a) is a diagram illustrating a procedure in which the HLA-A allele, the HLA-B allele, and the CIITA allele were knocked out in one stage. Furthermore, FIGS. 50(b) and 50(c) are diagrams illustrating a procedure in which the HLA-A allele, the HLA-B allele, and the CIITA allele were knocked out in two stages.

[0532] In the one-stage knockout, as shown in FIG. 50(a), first, Ff-Xt-28s05 iPS cells were transfected with A-ex3-g1 which is an sgRNA capable of targeting the HLA-A allele (where a target base sequence is set forth in SEQ ID NO: 55), B-ex2-g1 which is an sgRNA capable of targeting the HLA-B allele (where a target base sequence is set forth in SEQ ID NO: 53), and CIITA-ex3g5 which is an sgRNA capable of targeting the CIITA allele (where a target base sequence is set forth in SEQ ID NO: 8017), and a purified Cas9 protein. A commercially available kit (trade name “4D-Nucleofector,” model “V4XP-4032,” Lonza) was used for transfection.

[0533] Then, iPS cells were stimulated with 50 ng/mL IFN-γ for 48 hours and subjected to flow cytometric analysis to examine the expression of HLA-A24 antigen and HLA-B7 antigen. FIG. 51(a) is a graph showing results of flow cytometry. In FIG. 51(a), “No stain” indicates the analysis result of iPS cells that were not stained with an antibody, “No TF” indicates the analysis results of iPS cells into which sgRNA was not introduced, “HLA-A-ex3g1” indicates the results of introduction of A-ex3-g1 (where a target base sequence is set forth in SEQ ID NO: 55), “HLA-B-ex2g1” indicates the results of introducing B-ex2-g1 (where a target base sequence is set forth in SEQ ID NO: 53), and CIITA-ex3g5 indicates the results of introducing CIITA-ex3g5 (where a target base sequence is set forth in SEQ ID NO: 8017).

[0534] Subsequently, cell populations in which both HLA-A24 antigen and HLA-B7 antigen were negative were sorted and recovered, and subclones of 15 strains were obtained. Then, a base sequence of the HLA-A24 allele, HLA-B7 allele, and CIITA allele of the genome of each subclone was analyzed. FIG. 51(b) is a table showing a base mutation pattern of each subclone. In FIG. 51(b), “Clone ID” indicates the subclone name, “WT” indicates that it was a wild-type base sequence, “−” had a deletion mutation, “+” indicates that it had an insertion mutation, and “N.D.” indicates that a base sequence was not determined. Furthermore, “ABTo” in the subclone name means that the HLA-A allele, HLA-B allele, and CIITA allele were knocked out.

[0535] As a result, as shown in FIG. 51(b), clones #1, #2, #3, #6, #13, and #15 were obtained in which insertion deletion mutations (Indel mutations) were detected in all of the HLA-A allele, HLA-B allele, and CIITA allele.

[0536] In the two-stage knockout, as shown in FIG. 50(b), first, Ff-Xt-28s05 iPS cells were transfected with A-ex3-g1 which is an sgRNA capable of targeting the HLA-A allele (where a target base sequence is set forth in SEQ ID NO: 55), B-ex2-g1 which is an sgRNA capable of targeting the HLA-B allele (where a target base sequence is set forth in SEQ ID NO: 53), and a purified Cas9 protein. Thereby, subclones of 17 strains were obtained. A commercially available kit (trade name “4D-Nucleofector,” model “V4XP-4032,” Lonza) was used for transfection.

[0537] Then, a base sequence of the HLA-A24 allele and HLA-B7 allele of the genome of each subclone was analyzed. FIG. 52(a) is a table showing a base mutation pattern of each subclone. In FIG. 52(a), “Clone ID” indicates the subclone name, “WT” indicates that it was a wild-type base sequence, “−” had a deletion mutation, “+” indicates that it had an insertion mutation, and “Mut.” indicates that it had a substitution mutation. Furthermore, “ABo” in the subclone name means that the HLA-A allele and HLA-B allele were knocked out.

[0538] As a result, as shown in FIG. 52(a), clone #14 was obtained in which insertion deletion mutations (Indel mutations) were detected in both of the HLA-A allele and the HLA-B allele.

[0539] Subsequently, as shown in FIG. 50(c), the obtained clone #14 was transfected with CIITA-ex3g5 (where a target base sequence is set forth in SEQ ID NO: 8017), which is an sgRNA capable of targeting the CIITA allele, and a purified Cas9 protein.

[0540] Thereby, subclones of 12 strains were obtained. A commercially available kit (trade name “4D-Nucleofector,” model “V4XP-4032,” Lonza) was used for transfection.

[0541] Then, a base sequence of the CIITA allele of the genome of each subclone was analyzed. FIG. 52(b) is a table showing a base mutation pattern of each subclone. In FIG. 52(b), “Clone ID” indicates the subclone name, “WT” indicates that it was a wild-type base sequence, “−” had a deletion mutation, “+” indicates that it had an insertion mutation, and “N.D.” indicates that a base sequence was not determined. Furthermore, “ABo_To” in the subclone name means that the HLA-A and HLA-B alleles were knocked out, subcloned once, and then the CIITA allele was knocked out.

[0542] As a result, as shown in FIG. 52(b), clones #14-3, #14-4, #14-6, and #14-12 were obtained in which insertion deletion mutations (Indel mutations) that were frameshift mutations were detected in both alleles of CIITA.

[0543] FIG. 53 is a table showing allele frequency of an HLC-C allele in various races. In FIG. 53, “JPN” indicates Japanese, “EUR” indicates European American, “AFA” indicates African American, “API” indicates Asian, and “HIS” indicates Hispanic. In addition, “allele frequency” indicates frequency (%) of an allele in each race, and “rank” indicates the order of frequency from the highest frequency.

[0544] As shown in FIG. 53, it is possible to cover 93% or more of the population in any of the above races by producing 12 kinds of cells, which are HLA-C*01:02, HLA-C*02:02, HLA-C*03:03, HLA-C*03:04, HLA-C*04:01, HLA-C*05:01, HLA-C*06:02, HLA-C*07:01, HLA-C*07:02, HLA-C*08:01, HLA-C*12:02, and HLA-C*16:01.

[0545] That is, cells deficient in the HLA-A and HLA-B alleles and having any of the above 12 kinds of the HLA-C alleles, or cells deficient in the HLA-A allele, HLA-B allele, and CIITA allele and having any of the above 12 kinds of the HLA-C alleles are very useful as cells for cell therapy and regenerative medicine. The cells are not particularly limited as long as they are cells used for cell therapy, and they may be pluripotent stem cells or differentiated cells. Specifically, for example, iPS cells, T cells, hematopoietic stem cells, mesenchymal stem cells, and the like may be used.

### Experimental Example 43

### (Production 3 of B2M Knockout iPS Cell)

[0546] A B2M allele was knocked out from the iPS stock cells (Ff-Xt-28s05 iPS cells) also used in Experimental Example 41.

[0547] Ff-Xt-28s05 iPS cells were transfected with B2M-g2, which is an sgRNA capable of targeting the B2M allele (where a target base sequence is set forth in SEQ ID NO: 60) and a purified Cas9 protein. Thereby, subclones of 5 strains were obtained. A commercially available kit (trade name “4D-Nucleofector,” model “V4XP-4032,” Lonza) was used for transfection.

[0548] Then, a base sequence of the B2M allele of the genome of each subclone was analyzed. FIG. 54 is a table showing a base mutation pattern of each subclone. In FIG. 54, “Clone ID” indicates the subclone name, “WT” indicates that it was a wild-type base sequence, “−” had a deletion mutation, and “+” indicates that it had an insertion mutation. Furthermore, “Mo” in the subclone name means that the B2M allele was knocked out.

[0549] As a result, as shown in FIG. 54, clones #1 and #3 having frameshift mutations in the B2M allele were obtained.

### Experimental Example 44

### (Preparation of B2M and CIITA Knockout iPS Cells)

[0550] A B2M allele and a CIITA allele were knocked out at the same time from the iPS stock cells (Ff-Xt-28s05 iPS cells) also used in Experimental Example 41.

[0551] Ff-Xt-28s05 iPS cells were transfected with B2M-g2 which is an sgRNA capable of targeting the B2M allele (where a target base sequence is set forth in SEQ ID NO: 60), CIITA-ex3g5 which is an sgRNA capable of targeting the CIITA allele (where a target base sequence is set forth in SEQ ID NO: 8017), and a purified Cas9 protein. Thereby, subclones of 19 strains were obtained. A commercially available kit (trade name “4D-Nucleofector,” model “V4XP-4032,” Lonza) was used for transfection.

[0552] Then, a base sequence of the B2M and CIITA alleles of the genome of each subclone was analyzed. FIG. 55 is a table showing a base mutation pattern of each subclone. In FIG. 55, “Clone ID” indicates the subclone name, “WT” indicates that it was a wild-type base sequence, “−” had a deletion mutation, and “+” indicates that it had an insertion mutation. Furthermore, “MTo” in the subclone name means that the B2M allele and the CIITA allele were knocked out in one stage.

[0553] As a result, as shown in FIG. 55, clone #8 having a frameshift mutation in both the B2M allele and the CIITA allele was obtained.

[0554] Furthermore, it was revealed that in clone #2, only one of the B2M alleles was knocked out, and both of the CIITA alleles were knocked out. Accordingly, the clone #2 was obtained as a cell strain in which substantially only the CIITA allele was knocked out.

### Experimental Example 45

### (Examination of HLA Protein Expression in B2M and CIITA Knockout iPS Cells)

[0555] Expression of HLA-ABC protein in Ff-Xt-28s05-MTo #2 iPS cells produced in Experimental Example 44 was examined.

[0556] First, Ff-Xt-28s05-MTo #2 iPS cells were stimulated with 50 ng/mL IFN-γ for 48 hours. Thereafter, the cells were stained with an anti-HLA-ABC antibody (product number: 311418, BIOLEGEND) to be subjected to flow cytometric analysis, and expression of HLA-A protein, HLA-B protein, and HLA-C protein was examined.

[0557] FIGS. 56(a) and 56(b) are graphs showing results of flow cytometry. In FIG. 56(a), “No stain” indicates the analysis results of iPS cells not stained with the antibody. Furthermore, in FIG. 16(b), “Ff-Xt-28s05-MTo #2” indicates the analysis results of Ff-Xt-28s05-MTo #2 iPS cells.

[0558] As a result, it was revealed that the Ff-Xt-28s05-MTo #2 iPS cells maintained an expression ability of HLA-A protein, HLA-B protein, and HLA-C protein.

### Experimental Example 46

### (Production 4 of B2M Knockout iPS Cell)

[0559] 585A1 iPS cells were transfected with a plasmid vector expressing Cas9 and B2M-specific sgRNA. B2M-g2 (where a target base sequence is set forth in SEQ ID NO: 60) was used as sgRNA.

[0560] Subsequently, cells stimulated with 50 ng/mL IFN-γ for 48 hours were stained with an anti-HLA-ABC antibody, and flow cytometric analysis was performed.

[0561] FIG. 57 is a graph showing results of flow cytometry. In FIG. 57, “No stain” indicates the analysis results of iPS cells that were not stained with an antibody, “No TF” indicates the analysis results of iPS cells into which sgRNA was not introduced, and “B2M-g2” indicates the analysis results of iPS cells into which this sgRNA was introduced and in which the B2M allele was knocked out.

[0562] As a result, a proportion of the cell population in which all of HLA-A protein, HLA-B protein, and HLA-C protein were negative was 27.0%. Subsequently, a cell population which was obtained by the introduction of B2M-g2 sgRNA and in which all of HLA-A, HLA-B, and HLA-C were negative was recovered by sorting. No subcloning was performed herein.

### Experimental Example 47

### (HLA-Allele-Specific Knockout 10)

[0563] HLA-A, HLA-B, and HLA-C alleles of 585A1 iPS cells were knocked out to produce cells. Specifically, a purified Cas9 protein, an sgRNA specific to C*07:02 allele, and an sgRNA specific to C*12:02 allele were transfected to the cells (clone #3) which were produced in Experimental Example 13 and in which the A*24:02 allele, B*07:02 allele, and B*52:01 allele of the 585A1 iPS cells were knocked out.

[0564] C0702-ex3-g3 (where a target base sequence is set forth in SEQ ID NO: 49) was used as the sgRNA specific to the C*07:02 allele. In addition, C1202-ex3-g1 (where a target base sequence is set forth in SEQ ID NO: 50) was used as the sgRNA specific to the C*12:02 allele. A commercially available kit (trade name “4D-Nucleofector,” model “V4XP-4032,” Lonza) was used for transfection.

[0565] Thereafter, subcloning was performed to obtain subclones of six strains. Subsequently, genomic DNA was extracted from each subclone. Subsequently, base sequences of the HLA-C*07:02 allele and the HLA-C*12:02 allele were analyzed by Sanger sequence.

[0566] FIG. 58 is a table showing a base mutation pattern of each clone recovered. In FIG. 58, “Clone ID” indicates the subclone name, “HLA-C07” indicates the HLA-C*07:02 allele, “HLA-C12” indicates the HLA-C*12:02 allele, “WT” indicates that it was a wild-type base sequence, “−” had a deletion mutation, and “+” indicates that it had an insertion mutation. As a result, it was confirmed that both HLA-C alleles were knocked out in clones #3-4, #3-5, #3-6, and #3-7.

### Experimental Example 48

### (HLA-Allele-Specific Knockout 11)

[0567] A purified Cas9 protein and an sgRNA specific to C*07:02 allele were transfected to the cells (clone #3) which were produced in Experimental Example 13 and in which the A*24:02 allele, B*07:02 allele, and B*52:01 allele of the 585A1 iPS cells were knocked out.

[0568] C0702-ex3-g3 (where a target base sequence is set forth in SEQ ID NO: 49) was used as the sgRNA specific to the C*07:02 allele. A commercially available kit (trade name “4D-Nucleofector,” model “V4XP-4032,” Lonza) was used for transfection.

[0569] Thereafter, subcloning was performed to obtain subclones of six strains. Subsequently, genomic DNA was extracted from each subclone. Subsequently, base sequences of the HLA-C*07:02 allele and the HLA-C*12:02 allele were analyzed by Sanger sequence.

[0570] FIG. 59 is a table showing a base mutation pattern of each clone recovered. In FIG. 59, “Clone ID” indicates the subclone name, “HLA-C07” indicates the HLA-C*07:02 allele, “HLA-C12” indicates the HLA-C*12:02 allele, “WT” indicates that it was a wild-type base sequence, and “+” indicates that it had an insertion mutation. As a result, it was confirmed that the HLA-C*07:02 allele was knocked out and only the HLA-C*12:02 allele was left in the clones #3-1, #3-2, #3-3, #3-5, and #3-6.

[0571] As described above with reference to FIG. 53, by preparing 12 kinds of cells, which are HLA-C*01:02, HLA-C*02:02, HLA-C*03:03, HLA-C*03:04, HLA-C*04:01, HLA-C*05:01, HLA-C*06:02, HLA-C*07:01, HLA-C*07:02, HLA-C*08:01, HLA-C*12:02, and HLA-C*16:01, it is possible to cover a population of 93% or more in any race of Japanese, European American, African American, Asian, and Hispanic.

[0572] The cells produced in the present experimental example can be used as one of these 12 kinds of cells.

### Experimental Example 49

### (HLA-Allele-Specific Knockout 12)

[0573] A purified Cas9 protein and an sgRNA specific to C*07:02 allele were transfected to the cells (clone #4) which were produced in Experimental Example 14 and in which the A*01:01 allele, A*24:02 allele, B*07:02 allele, and B*37:01 allele of the 604B1 iPS cells were knocked out.

[0574] C0702-ex3-g3 (where a target base sequence is set forth in SEQ ID NO: 49) was used as the sgRNA specific to the C*07:02 allele. A commercially available kit (trade name “4D-Nucleofector,” model “V4XP-4032,” Lonza) was used for transfection.

[0575] Thereafter, subcloning was performed to obtain subclones of 11 strains. Subsequently, genomic DNA was extracted from each subclone. Subsequently, base sequences of the HLA-C*06:02 allele and the HLA-C*12:02 allele were analyzed by Sanger sequence.

[0576] FIG. 60 is a table showing a base mutation pattern of each clone recovered. In FIG. 60, “Clone ID” indicates the subclone name, “HLA-C06” indicates the HLA-C*06:02 allele, “HLA-C07” indicates the HLA-C*07:02 allele, “WT” indicates that it was a wild-type base sequence, “−” had an insertion mutation, and “+” indicates that it had an insertion mutation. As a result, it was confirmed that the HLA-C*07:02 allele was knocked out and only the HLA-C*06:02 allele was left in the clones #4-2, #4-6, #4-10, and #4-11.

[0577] As described above with reference to FIG. 53, by preparing 12 kinds of cells, which are HLA-C*01:02, HLA-C*02:02, HLA-C*03:03, HLA-C*03:04, HLA-C*04:01, HLA-C*05:01, HLA-C*06:02, HLA-C*07:01, HLA-C*07:02, HLA-C*08:01, HLA-C*12:02, and HLA-C*16:01, it is possible to cover a population of 93% or more in any race of Japanese, European American, African American, Asian, and Hispanic.

[0578] The cells produced in the present experimental example can be used as one of these 12 kinds of cells.

### INDUSTRIAL APPLICABILITY

[0579] According to the present invention, it is possible to provide a technique for producing a low-antigenic cell in which a rejection reaction is reduced in a case where the cell is allogeneically transplanted into a recipient.

The application's sequence listing, which the Patent Office published only in electronic form, follows.

SEQUENCE LISTING (8017 sequences)

SEQ ID NO: 1 - DNA, 27 bp, Homo sapiens
  source 1..27: mol_type = genomic DNA
gtaccaccagtacgcctacgacggcaa

SEQ ID NO: 2 - DNA, 27 bp, Homo sapiens
  source 1..27: mol_type = genomic DNA
gtaccagcaggacgcctacgacggcaa

SEQ ID NO: 3 - DNA, 23 bp, Homo sapiens
  source 1..23: mol_type = genomic DNA
taccaccagtacgcctacgacgg

SEQ ID NO: 4 - DNA, 23 bp, Homo sapiens
  source 1..23: mol_type = genomic DNA
tgccgtcgtaggcgtactggtgg

SEQ ID NO: 5 - DNA, 27 bp, Homo sapiens
  source 1..27: mol_type = genomic DNA
tcacaccgtccagaggatgtgtggctg

SEQ ID NO: 6 - DNA, 27 bp, Homo sapiens
  source 1..27: mol_type = genomic DNA
tcacaccatccagatgatgtatggctg

SEQ ID NO: 7 - DNA, 23 bp, Homo sapiens
  source 1..23: mol_type = genomic DNA
cacaccgtccagaggatgtgtgg

SEQ ID NO: 8 - DNA, 19 bp, Homo sapiens
  source 1..19: mol_type = genomic DNA
gggtaccggcaggacgcct

SEQ ID NO: 9 - DNA, 15 bp, Homo sapiens
  source 1..15: mol_type = genomic DNA
gggtaccggccgcct

SEQ ID NO: 10 - DNA, 16 bp, Homo sapiens
  source 1..16: mol_type = genomic DNA
acaaggcccaggcaca

SEQ ID NO: 11 - DNA, 14 bp, Homo sapiens
  source 1..14: mol_type = genomic DNA
acaacccaggcaca

SEQ ID NO: 12 - DNA, 13 bp, Homo sapiens
  source 1..13: mol_type = genomic DNA
ggcaggacgccta

SEQ ID NO: 13 - DNA, 14 bp, Homo sapiens
  source 1..14: mol_type = genomic DNA
ggtgtgagagatgt

SEQ ID NO: 14 - DNA, 13 bp, Homo sapiens
  source 1..13: mol_type = genomic DNA
tcttggaccgcgg

SEQ ID NO: 15 - DNA, 14 bp, Homo sapiens
  source 1..14: mol_type = genomic DNA
tcttggaaccgcgg

SEQ ID NO: 16 - DNA, 13 bp, Homo sapiens
  source 1..13: mol_type = genomic DNA
tcttggaccgcgg

SEQ ID NO: 17 - DNA, 14 bp, Homo sapiens
  source 1..14: mol_type = genomic DNA
tcttggaaccgcgg

SEQ ID NO: 18 - DNA, 14 bp, Homo sapiens
  source 1..14: mol_type = genomic DNA
agtattgggaccgg

SEQ ID NO: 19 - DNA, 13 bp, Homo sapiens
  source 1..13: mol_type = genomic DNA
agtattggaccgg

SEQ ID NO: 20 - DNA, 14 bp, Homo sapiens
  source 1..14: mol_type = genomic DNA
tgggaccgggagac

SEQ ID NO: 21 - DNA, 14 bp, Homo sapiens
  source 1..14: mol_type = genomic DNA
gtattgggaccggg

SEQ ID NO: 22 - DNA, 23 bp, Homo sapiens
  source 1..23: mol_type = genomic DNA
gtattggcaattctgtgaccggg

SEQ ID NO: 23 - DNA, 17 bp, Homo sapiens
  source 1..17: mol_type = genomic DNA
gaggggccggagtattg

SEQ ID NO: 24 - DNA, 40 bp, Homo sapiens
  source 1..40: mol_type = genomic DNA
ggacctgcgctcttggaccgcggcggacatggcggctcag

SEQ ID NO: 25 - DNA, 40 bp, Homo sapiens
  source 1..40: mol_type = genomic DNA
ggayctgasctctkggaamtggssggttcraatcaccars

SEQ ID NO: 26 - DNA, 16 bp, Homo sapiens
  source 1..16: mol_type = genomic DNA
cacccagttcgtgagg

SEQ ID NO: 27 - DNA, 15 bp, Homo sapiens
  source 1..15: mol_type = genomic DNA
cacccagtcgtgagg

SEQ ID NO: 28 - DNA, 14 bp, Homo sapiens
  source 1..14: mol_type = genomic DNA
cacccagttcgtga

SEQ ID NO: 29 - DNA, 15 bp, Homo sapiens
  source 1..15: mol_type = genomic DNA
cacccagtttcgtga

SEQ ID NO: 30 - DNA, 36 bp, Homo sapiens
  source 1..36: mol_type = genomic DNA
cagaggatgtacggctgcgacctggggcccgacggg

SEQ ID NO: 31 - DNA, 35 bp, Homo sapiens
  source 1..35: mol_type = genomic DNA
cagagatgtacggctgcgacctggggcccgacggg

SEQ ID NO: 32 - DNA, 38 bp, Homo sapiens
  source 1..38: mol_type = genomic DNA
gccgagatgtctcgctccgtggccttagctgtgctcgc

SEQ ID NO: 33 - DNA, 36 bp, Homo sapiens
  source 1..36: mol_type = genomic DNA
gccgagatgtctcgcckyggyctyctytgytgtcst

SEQ ID NO: 34 - DNA, 30 bp, Homo sapiens
  source 1..30: mol_type = genomic DNA
tcgggccgagatgtctcgctccgtggcctt

SEQ ID NO: 35 - DNA, 31 bp, Homo sapiens
  source 1..31: mol_type = genomic DNA
tcgggccgagatgtctcgcttccgtggcctt

SEQ ID NO: 36 - DNA, 24 bp, Homo sapiens
  source 1..24: mol_type = genomic DNA
tcgggccgagatskckctwgtctc

SEQ ID NO: 37 - DNA, 31 bp, Homo sapiens; identical to SEQ ID NO: 35
  source 1..31: mol_type = genomic DNA

SEQ ID NO: 38 - DNA, 25 bp, Homo sapiens
  source 1..25: mol_type = genomic DNA
tcgggccgagatgtctcgtggcctt

SEQ ID NO: 39 - DNA, 76 bp, synthetic construct
  misc_feature 1..76: note = Synthesized oligonucleotide
  source 1..76: mol_type = other DNA
gttttagagctagaaatagcaagttaaaataaggctagtccgttatcaacttgaaaaagtggcaccgagtcggtgc

SEQ ID NO: 40 - skipped

SEQ ID NO: 41 - DNA, 19 bp, synthetic construct
  misc_feature 1..19: note = Synthesized oligonucleotide
  source 1..19: mol_type = other DNA
ttggggattccccaactcc

SEQ ID NO: 42 - DNA, 18 bp, synthetic construct
  misc_feature 1..18: note = Synthesized oligonucleotide
  source 1..18: mol_type = other DNA
gtccactgttccgcccaa

SEQ ID NO: 43 - DNA, 20 bp, synthetic construct
  misc_feature 1..20: note = Synthesized oligonucleotide
  source 1..20: mol_type = other DNA
ggtccggagtattgggacgg

SEQ ID NO: 44 - DNA, 20 bp, synthetic construct
  misc_feature 1..20: note = Synthesized oligonucleotide
  source 1..20: mol_type = other DNA
tctcaactgctccgccacat

SEQ ID NO: 45 - DNA, 23 bp, Homo sapiens
  source 1..23: mol_type = genomic DNA
ggcgcttcctccgcgggtaccgg

SEQ ID NO: 46 - DNA, 23 bp, Homo sapiens
  source 1..23: mol_type = genomic DNA
tgccgtcgtaggcgtcctgccgg

SEQ ID NO: 47 - DNA, 23 bp, Homo sapiens
  source 1..23: mol_type = genomic DNA
cacacagatctacaaggcccagg

SEQ ID NO: 48 - DNA, 24 bp, Homo sapiens
  source 1..24: mol_type = genomic DNA
gacagcgacgccgcgagtccgagg

SEQ ID NO: 49 - DNA, 23 bp, Homo sapiens
  source 1..23: mol_type = genomic DNA
gatctgagccgcggtgtccgcgg

SEQ ID NO: 50 - DNA, 23 bp, Homo sapiens
  source 1..23: mol_type = genomic DNA
ggtcgcagccgtacatcctctgg

SEQ ID NO: 51 - DNA, 23 bp, Homo sapiens
  source 1..23: mol_type = genomic DNA
aggcgtactggttatgcccgcgg

SEQ ID NO: 52 - DNA, 23 bp, Homo sapiens
  source 1..23: mol_type = genomic DNA
ggtcgcagccatacatccactgg

SEQ ID NO: 53 - DNA, 23 bp, Homo sapiens
  source 1..23: mol_type = genomic DNA
gctgtcgaacctcacgaactggg

SEQ ID NO: 54 - DNA, 22 bp, Homo sapiens
  source 1..22: mol_type = genomic DNA
ggggccggagtattgggaccgg

SEQ ID NO: 55 - DNA, 23 bp, Homo sapiens
  source 1..23: mol_type = genomic DNA
ggacctgcgctcttggaccgcgg

SEQ ID NO: 56 - DNA, 1377 bp, Homo sapiens
  source 1..1377: mol_type = genomic DNA
cttttttataatgccaactttgtacaaaaaagcaggctggcgccggaaccaattcagtcgacggtcgcggtcgctgttctaaagtccgcacgcacccaccgggactcagattctccccagacgccgaggatggccgtcatggcgccccgaaccctcctcctgctactctcgggggccctggccctgacccagacctgggcgggtgagtgcggggtcgggagggaaaccgcctctgcggggagaagcaaggggccctcctggcgggggcgcaggaccgggggagccgcgccgggaggagggtcgggcaggtctcagccactgctcgcccccaggctcccactccatgaggtatttcttcacatccgtgtcccggcccggccgcggggagccccgcttcatcgccgtgggctacgtggacgacacgcagttcgtgcggttcgacagcgacgccgcgagccagaagatggagccgcgggcgccgtggatagagcaggaggggccggagtattgggaccaggagacacggaatatgaaggcccactcacagactgaccgagcgaacctggggaccctgcgcggctactacaaccagagcgaggacggtgagtgaccccggcccggggcgcaggtcacgacccctcatcccccacggacgggccaggtcgcccacagtctccgggtccgagatccaccccgaagccgcgggactccgagacccttgtcccgggagaggcccaggcgcctttacccggtttcattttcagtttaggccaaaaatccccccgggttggtcggggcggggcggggctcgggggactgggctgaccgcggggtcggggccaggttctcacaccatccagataatgtatggctgcgacgtggggccggacgggcgcttcctccgcgggtaccggcaggacgcctacgacggcaaggattacatcgccctgaacgaggacctgcgctcttggaccgcggcggacatggcagctcagatcaccaagcgcaagtgggaggcggtccatgcggcggagcagcggagagtctacctggagggccggtgcgtggacgggctccgcagatacctggagaacgggaaggagacgctgcagcgcacgggtaccaggggccacggggcgcctccctgatcgcctatagatctcccgggctggcctcccacaaggaggggagacaattgggaccaacactagaatatcaccctccctctggtcctgagggagaggaatcctcctgggtttccagatcctgtaccagagagtgactctgaggttccgccctgctctctgacacaattaagggataaaatctctgaaggagtgacgggaagacgatccctcgaatactgatgatcgagat

SEQ ID NO: 57 - DNA, 34 bp, synthetic construct
  misc_feature 1..34: note = Synthesized oligonucleotide
  source 1..34: mol_type = other DNA
ccaattcagtcgacggtcgcggtcgctgttctaa

SEQ ID NO: 58 - DNA, 39 bp, synthetic construct
  misc_feature 1..39: note = Synthesized oligonucleotide
  source 1..39: mol_type = other DNA
gtctagatatctcgatcatcagtattcgagggatcgtct

SEQ ID NO: 59 - DNA, 22 bp, Homo sapiens
  source 1..22: mol_type = genomic DNA
agtagcgcgagcacagctaagg

SEQ ID NO: 60 - DNA, 22 bp, Homo sapiens
  source 1..22: mol_type = genomic DNA
gccgagatgtctcgctccgtgg

SEQ ID NO: 61 - DNA, 22 bp, Homo sapiens
  source 1..22: mol_type = genomic DNA
ggtatcttacaggaactccagg

SEQ ID NO: 62 - skipped

SEQ ID NO: 63 - RNA, 103 nt, synthetic construct
  misc_feature 1..103: note = Synthesized sgRNA
  misc_feature 1..20: note = n is a, c, g, or u
  source 1..103: mol_type = other RNA
nnnnnnnnnnnnnnnnnnnngttttagagctagaaatagcaagttaaaataaggctagtccgttatcaacttgaaaaagtggcaccgagtcggtgcttttttt

SEQ ID NO: 64 - RNA, 42 nt, synthetic construct
  misc_feature 1..42: note = Synthesized crRNA
  misc_feature 1..20: note = n is a, c, g, or u
  source 1..42: mol_type = other RNA
nnnnnnnnnnnnnnnnnnnngttttagagctatgctgttttg

SEQ ID NO: 65 - RNA, 70 nt, synthetic construct
  misc_feature 1..70: note = Synthesized tracrRNA
  source 1..70: mol_type = other RNA
caaaacagcatagcaagttaaaataaggctagtccgttatcaacttgaaaaagtggcaccgagtcggtgc

SEQ ID NO: 66 - DNA, 19 bp, Homo sapiens
  source 1..19: mol_type = genomic DNA
cttcacttcccaggtgcaa

SEQ ID NO: 67 - DNA, 20 bp, Homo sapiens
  source 1..20: mol_type = genomic DNA
aggctagccaacatgaggaa

SEQ ID NO: 68 - DNA, 18 bp, Homo sapiens
  source 1..18: mol_type = genomic DNA
ccaaccgcgagaagatga

SEQ ID NO: 69 - DNA, 20 bp, Homo sapiens
  source 1..20: mol_type = genomic DNA
ccagaggcgtacagggatag

SEQ ID NO: 70 - DNA, 20 bp, synthetic construct
  misc_feature 1..20: note = Synthesized oligonucleotide
  source 1..20: mol_type = other DNA
gggccggagtattgggacca

SEQ ID NO: 71 - DNA, 19 bp, synthetic construct
  misc_feature 1..19: note = Synthesized oligonucleotide
  source 1..19: mol_type = other DNA
ctcaactgctccgccacat

SEQ ID NO: 72 - DNA, 23 bp, Homo sapiens
  source 1..23: mol_type = genomic DNA
aaaaatccccctggttggtcggg

SEQ ID NO: 73 - DNA, 23 bp, Homo sapiens
  source 1..23: mol_type = genomic DNA
aaaaggagggagttactctcagg

SEQ ID NO: 74 - DNA, 23 bp, Homo sapiens
  source 1..23: mol_type = genomic DNA
aaaatccccctggttggtcgggg

SEQ ID NO: 75 - DNA, 23 bp, Homo sapiens
  source 1..23: mol_type = genomic DNA
aaaatctctgaaggaatgaccgg

SEQ ID NO: 76 - DNA, 23 bp, Homo sapiens
  source 1..23: mol_type = genomic DNA
aaacacaaggaaagcaagtgtgg

SEQ ID NO: 77 - DNA, 23 bp, Homo sapiens
  source 1..23: mol_type = genomic DNA
aaacccctcaccctgagatgggg

SEQ ID NO: 78 - DNA, 23 bp, Homo sapiens
  source 1..23: mol_type = genomic DNA
aaaccgggtaaaggcgcctgggg

SEQ ID NO: 79 - DNA, 23 bp, Homo sapiens
  source 1..23: mol_type = genomic DNA
aaaccgggtaaagtcgcctgggg

SEQ ID NO: 80 - DNA, 23 bp, Homo sapiens
  source 1..23: mol_type = genomic DNA
aaaccgggttaaaggcgcctggg

SEQ ID NO: 81 - DNA, 23 bp, Homo sapiens
  source 1..23: mol_type = genomic DNA
aaagagacgctgcagcgcgcagg

SEQ ID NO: 82 - DNA, 23 bp, Homo sapiens
  source 1..23: mol_type = genomic DNA
aaaggcacctgggcctctcccgg

SEQ ID NO: 83 - DNA, 23 bp, Homo sapiens
  source 1..23: mol_type = genomic DNA
aaagtcaccagtcacccacccgg

SEQ ID NO: 84 - DNA, 23 bp, Homo sapiens
  source 1..23: mol_type = genomic DNA
aaatgatggcggcgggcgtgtgg

SEQ ID NO: 85 - DNA, 23 bp, Homo sapiens
  source 1..23: mol_type = genomic DNA
aacacaaggaaagcaagtgtggg

SEQ ID NO: 86 - DNA, 23 bp, Homo sapiens
  source 1..23: mol_type = genomic DNA
aaccctcctcctgctgctctagg

SEQ ID NO: 87 - DNA, 23 bp, Homo sapiens
  source 1..23: mol_type = genomic DNA
aacgacgccgcgagtccgagagg

SEQ ID NO: 88 - DNA, 23 bp, Homo sapiens
  source 1..23: mol_type = genomic DNA
aactcaggacacccagcttgtgg

SEQ ID NO: 89 - DNA, 23 bp, Homo sapiens
  source 1..23: mol_type = genomic DNA
aactctcctcctgctgctctcgg

SEQ ID NO: 90 - DNA, 23 bp, Homo sapiens
  source 1..23: mol_type = genomic DNA
aagacggctccgggaaaggaagg

SEQ ID NO: 91 - DNA, 23 bp, Homo sapiens
  source 1..23: mol_type = genomic DNA
aagagcgcaggtcgtctttcagg

SEQ ID NO: 92 - DNA, 23 bp, Homo sapiens
  source 1..23: mol_type = genomic DNA
aagagctcaggtggaaaaggagg

SEQ ID NO: 93 - DNA, 23 bp, Homo sapiens
  source 1..23: mol_type = genomic DNA
aagcagggctccccgcggccggg

SEQ ID NO: 94 - DNA, 23 bp, Homo sapiens
  source 1..23: mol_type = genomic DNA
aagcggagctccccgcggccggg

SEQ ID NO: 95 - DNA, 23 bp, Homo sapiens
  source 1..23: mol_type = genomic DNA
aagcggcctctgcggagaggagg

SEQ ID NO: 96 - DNA, 23 bp, Homo sapiens
  source 1..23: mol_type = genomic DNA
aagcgggactctccgcggccggg

SEQ ID NO: 97 - DNA, 23 bp, Homo sapiens
  source 1..23: mol_type = genomic DNA
aagcggggctccccacggccggg

SEQ ID NO: 98 - DNA, 23 bp, Homo sapiens
  source 1..23: mol_type = genomic DNA
aagcggggctccccgcagccggg

SEQ ID NO: 99 - DNA, 23 bp, Homo sapiens
  source 1..23: mol_type = genomic DNA
aagcggggctccccgctgccggg

SEQ ID NO: 100 - DNA, 23 bp, Homo sapiens
  source 1..23: mol_type = genomic DNA
aagcggggctcctcgcggccggg

SEQ ID NO: 101 - DNA, 23 bp, Homo sapiens
  source 1..23: mol_type = genomic DNA
aagcggggctctccgcggcctgg

SEQ ID NO: 102 - DNA, 23 bp, Homo sapiens
  source 1..23: mol_type = genomic DNA
aagcggggttccccgcggccggg

SEQ ID NO: 103 - DNA, 23 bp, Homo sapiens
  source 1..23: mol_type = genomic DNA
aagcggtgctctccgcggccagg

SEQ ID NO: 104 - DNA, 23 bp, Homo sapiens
  source 1..23: mol_type = genomic DNA
aaggaaacgctgcagcgcacggg

SEQ ID NO: 105 - DNA, 23 bp, Homo sapiens
  source 1..23: mol_type = genomic DNA
aaggaaacgctgcagcgcgcggg

SEQ ID NO: 106 - DNA, 23 bp, Homo sapiens
  source 1..23: mol_type = genomic DNA
aaggagaccctgcagcgcgcggg

SEQ ID NO: 107 - DNA, 23 bp, Homo sapiens
  source 1..23: mol_type = genomic DNA
aaggagacgctgcaacgcgcggg

SEQ ID NO: 108 - DNA, 23 bp, Homo sapiens
  source 1..23: mol_type = genomic DNA
aaggagacgctgcagagcgcggg

SEQ ID NO: 109 - DNA, 23 bp, Homo sapiens
  source 1..23: mol_type = genomic DNA
aaggagacgctgcagcacgcggg

SEQ ID NO: 110 - DNA, 23 bp, Homo sapiens
  source 1..23: mol_type = genomic DNA
aaggagacgctgcagcgcacagg

SEQ ID NO: 111 - DNA, 23 bp, Homo sapiens
  source 1..23: mol_type = genomic DNA
aaggagacgctgcagcgcactgg

SEQ ID NO: 112 - DNA, 23 bp, Homo sapiens
  source 1..23: mol_type = genomic DNA
aaggagacgctggagcgcgcggg

SEQ ID NO: 113 - DNA, 23 bp, Homo sapiens
  source 1..23: mol_type = genomic DNA
aaggagatgctgcagcgcacggg

SEQ ID NO: 114 - DNA, 23 bp, Homo sapiens
  source 1..23: mol_type = genomic DNA
aaggcacagactgaccgagtggg

SEQ ID NO: 115 - DNA, 23 bp, Homo sapiens
  source 1..23: mol_type = genomic DNA
aaggcacctgggcctctcccggg

SEQ ID NO: 116 - DNA, 23 bp, Homo sapiens
  source 1..23: mol_type = genomic DNA
aaggcccaggcacagactgacgg

SEQ ID NO: 117 - DNA, 23 bp, Homo sapiens
  source 1..23: mol_type = genomic DNA
aaggcgcctggggctctcgccgg

SEQ ID NO: 118 - DNA, 23 bp, Homo sapiens
  source 1..23: mol_type = genomic DNA
aaggggagccgcgggcgccgtgg

SEQ ID NO: 119 - DNA, 23 bp, Homo sapiens
  source 1..23: mol_type = genomic DNA
aaggggtggggagtggggtctgg

SEQ ID NO: 120 - DNA, 23 bp, Homo sapiens
  source 1..23: mol_type = genomic DNA
aagtccgagaggggagccccggg

SEQ ID NO: 121 - DNA, 23 bp, Homo sapiens
  source 1..23: mol_type = genomic DNA
aagtcgcctggggctctctgcgg

SEQ ID NO: 122 - DNA, 23 bp, Homo sapiens
  source 1..23: mol_type = genomic DNA
aagtcgctgttccctcgtcaggg

SEQ ID NO: 123 - DNA, 23 bp, Homo sapiens
  source 1..23: mol_type = genomic DNA
aagtcgctgttccctctgcaggg

SEQ ID NO: 124 - DNA, 23 bp, Homo sapiens
  source 1..23: mol_type = genomic DNA
aagtgaaactcagggaagtgggg

SEQ ID NO: 125 - DNA, 23 bp, Homo sapiens
  source 1..23: mol_type = genomic DNA
aagtgaaactcttgggagtgggg

SEQ ID NO: 126 - DNA, 23 bp, Homo sapiens
  source 1..23: mol_type = genomic DNA
aagtgatgccggtgggcgtgtgg

SEQ ID NO: 127 - DNA, 23 bp, Homo sapiens
  source 1..23: mol_type = genomic DNA
aagtgatggcggtggccgtgtgg

SEQ ID NO: 128 - DNA, 23 bp, Homo sapiens
  source 1..23: mol_type = genomic DNA
aagtgccatgttcagcacgaggg

SEQ ID NO: 129 - DNA, 23 bp, Homo sapiens
  source 1..23: mol_type = genomic DNA
aatacctggtcagagcccgcagg

SEQ ID NO: 130 - DNA, 23 bp, Homo sapiens
  source 1..23: mol_type = genomic DNA
aatcagcgtctccgcagtaccgg

SEQ ID NO: 131 - DNA, 23 bp, Homo sapiens
  source 1..23: mol_type = genomic DNA
aatcagcgtctccgcagtccagg

SEQ ID NO: 132 - DNA, 23 bp, Homo sapiens
  source 1..23: mol_type = genomic DNA
aatctgagccgcggtgtccgcgg

SEQ ID NO: 133 - DNA, 23 bp, Homo sapiens
  source 1..23: mol_type = genomic DNA
aatctgtccttcattgtaacagg

SEQ ID NO: 134 - DNA, 23 bp, Homo sapiens
  source 1..23: mol_type = genomic DNA
aatcttctattccctgacgaggg

SEQ ID NO: 135 - DNA, 23 bp, Homo sapiens
  source 1..23: mol_type = genomic DNA
aatcttctattccctgcagaggg

SEQ ID NO: 136 - DNA, 23 bp, Homo sapiens
  source 1..23: mol_type = genomic DNA
aatgcccacgatggggacagtgg

SEQ ID NO: 137 - DNA, 23 bp, Homo sapiens
  source 1..23: mol_type = genomic DNA
aattcaggacactgagcttgtgg

SEQ ID NO: 138 - DNA, 23 bp, Homo sapiens
  source 1..23: mol_type = genomic DNA
aattcatatcactcacagtgagg

SEQ ID NO: 139 - DNA, 23 bp, Homo sapiens
  source 1..23: mol_type = genomic DNA
aattcatatctgtcacagtgagg

SEQ ID NO: 140 - DNA, 23 bp, Homo sapiens
  source 1..23: mol_type = genomic DNA
aattgtcctagacagcagagggg

SEQ ID NO: 141 - DNA, 23 bp, Homo sapiens
  source 1..23: mol_type = genomic DNA
aattgtgtcacagagcaggccgg

SEQ ID NO: 142 - DNA, 23 bp, Homo sapiens
  source 1..23: mol_type = genomic DNA
acaagggtctcggagccccgcgg

SEQ ID NO: 143 - DNA, 23 bp, Homo sapiens
  source 1..23: mol_type = genomic DNA
acacactgaccgagtggacctgg

SEQ ID NO: 144 - DNA, 23 bp, Homo sapiens
  source 1..23: mol_type = genomic DNA
acaccaacacagacacatgcagg

SEQ ID NO: 145 - DNA, 23 bp, Homo sapiens
  source 1..23: mol_type = genomic DNA
acaccacgcacgtgccctccagg

SEQ ID NO: 146 - DNA, 23 bp, Homo sapiens
  source 1..23: mol_type = genomic DNA
acacccagcttgtggagaccagg

SEQ ID NO: 147 - DNA, 23 bp, Homo sapiens
  source 1..23: mol_type = genomic DNA
acacggacctggcagcgggatgg

SEQ ID NO: 148 - DNA, 23 bp, Homo sapiens
  source 1..23: mol_type = genomic DNA
acacggagctcgtggaggccagg

SEQ ID NO: 149 - DNA, 23 bp, Homo sapiens
  source 1..23: mol_type = genomic DNA
acacgggccgcctcccacttggg

SEQ ID NO: 150 - DNA, 23 bp, Homo sapiens
  source 1..23: mol_type = genomic DNA
acactgaccgagtggacctgggg

SEQ ID NO: 151 - DNA, 23 bp, Homo sapiens
  source 1..23: mol_type = genomic DNA
acactgacctgacagcgggatgg

SEQ ID NO: 152 - DNA, 23 bp, Homo sapiens
  source 1..23: mol_type = genomic DNA
acactgacctggtagcgggatgg

SEQ ID NO: 153 - DNA, 23 bp, Homo sapiens
  source 1..23: mol_type = genomic DNA
acactgatctggcagtgggatgg

SEQ ID NO: 154 - DNA, 23 bp, Homo sapiens
  source 1..23: mol_type = genomic DNA
acagaacccaaacaccagcctgg

SEQ ID NO: 155 - DNA, 23 bp, Homo sapiens
  source 1..23: mol_type = genomic DNA
acagaacccagacaccagcccgg

SEQ ID NO: 156 - DNA, 23 bp, Homo sapiens
  source 1..23: mol_type = genomic DNA
acagacctcaggagggcgattgg

SEQ ID NO: 157 - DNA, 23 bp, Homo sapiens
  source 1..23: mol_type = genomic DNA
acagcagagggggccctcagagg

SEQ ID NO: 158 - DNA, 23 bp, Homo sapiens
  source 1..23: mol_type = genomic DNA
acagccacgccgcgagtccgagg

SEQ ID NO: 159 - DNA, 23 bp, Homo sapiens
  source 1..23: mol_type = genomic DNA
acagcccctcgtgctgcacatgg

SEQ ID NO: 160 - DNA, 23 bp, Homo sapiens
  source 1..23: mol_type = genomic DNA
acagcgacgccgcgagccaaagg

SEQ ID NO: 161 - DNA, 23 bp, Homo sapiens
  source 1..23: mol_type = genomic DNA
acagcgacgctgcgagtccgagg

SEQ ID NO: 162 - DNA, 23 bp, Homo sapiens
  source 1..23: mol_type = genomic DNA
acaggacatttgcttcccacagg

SEQ ID NO: 163 - DNA, 23 bp, Homo sapiens
  source 1..23: mol_type = genomic DNA
acaggggctaacgcagcctgggg

SEQ ID NO: 164 - DNA, 23 bp, Homo sapiens
  source 1..23: mol_type = genomic DNA
acatctctgaggaaatggagggg

SEQ ID NO: 165 - DNA, 23 bp, Homo sapiens
  source 1..23: mol_type = genomic DNA
acatgccaggtacagcatgaggg

SEQ ID NO: 166 - DNA, 23 bp, Homo sapiens
  source 1..23: mol_type = genomic DNA
accagcggacgcaggcacctggg

SEQ ID NO: 167 - DNA, 23 bp, Homo sapiens
  source 1..23: mol_type = genomic DNA
accagtacgcctacgacggcagg

SEQ ID NO: 168 - DNA, 23 bp, Homo sapiens
  source 1..23: mol_type = genomic DNA
accagtcacccacccggactcgg

SEQ ID NO: 169 - DNA, 23 bp, Homo sapiens
  source 1..23: mol_type = genomic DNA
acccaataggagtgagaactggg

SEQ ID NO: 170 - DNA, 23 bp, Homo sapiens
  source 1..23: mol_type = genomic DNA
acccaattggagtgagaactggg

SEQ ID NO: 171 - DNA, 23 bp, Homo sapiens
  source 1..23: mol_type = genomic DNA
acccagacaccagcggacgcagg

SEQ ID NO: 172 - DNA, 23 bp, Homo sapiens
  source 1..23: mol_type = genomic DNA
acccagcagtcacaagtcacagg

SEQ ID NO: 173 - DNA, 23 bp, Homo sapiens
  source 1..23: mol_type = genomic DNA
acccagttctcactccaattggg

SEQ ID NO: 174 - DNA, 23 bp, Homo sapiens
  source 1..23: mol_type = genomic DNA
acccagttctcactcccatcggg

SEQ ID NO: 175 - DNA, 23 bp, Homo sapiens
  source 1..23: mol_type = genomic DNA
acccagttctcactcctattggg

SEQ ID NO: 176 - DNA, 23 bp, Homo sapiens
  source 1..23: mol_type = genomic DNA
accccaacaccataatatcaagg

SEQ ID NO: 177 - DNA, 23 bp, Homo sapiens
  source 1..23: mol_type = genomic DNA
accccacgcacaggccctccagg

SEQ ID NO: 178 - DNA, 23 bp, Homo sapiens
  source 1..23: mol_type = genomic DNA
acccctcattccccacggacggg

SEQ ID NO: 179 - DNA, 23 bp, Homo sapiens
  source 1..23: mol_type = genomic DNA
acccgatgggagtgagaactggg

SEQ ID NO: 180 - DNA, 23 bp, Homo sapiens
  source 1..23: mol_type = genomic DNA
acccgcccaggtctcggtcaggg

SEQ ID NO: 181 - DNA, 23 bp, Homo sapiens
  source 1..23: mol_type = genomic DNA
acccgggaagccgcgcagggagg

SEQ ID NO: 182 - DNA, 23 bp, Homo sapiens
  source 1..23: mol_type = genomic DNA
acccggggagccgcgccggtagg

SEQ ID NO: 183 - DNA, 23 bp, Homo sapiens
  source 1..23: mol_type = genomic DNA
accctcctcctgctgctctaggg

SEQ ID NO: 184 - DNA, 23 bp, Homo sapiens
  source 1..23: mol_type = genomic DNA
accctgagatgggataaggaggg

SEQ ID NO: 185 - DNA, 23 bp, Homo sapiens
  source 1..23: mol_type = genomic DNA
accctgagatgggttaaggaggg

SEQ ID NO: 186 - DNA, 23 bp, Homo sapiens
  source 1..23: mol_type = genomic DNA
accctgaggtgctgggccatggg

SEQ ID NO: 187 - DNA, 23 bp, Homo sapiens
  source 1..23: mol_type = genomic DNA
accggaacacacagatcttcagg

SEQ ID NO: 188 - DNA, 23 bp, Homo sapiens
  source 1..23: mol_type = genomic DNA
accggtcatacccgcggaggagg

SEQ ID NO: 189 - DNA, 23 bp, Homo sapiens
  source 1..23: mol_type = genomic DNA
accggtgagtgaccccggcccgg

SEQ ID NO: 190 - DNA, 23 bp, Homo sapiens
  source 1..23: mol_type = genomic DNA
accgtgagtgaccccggcccggg

SEQ ID NO: 191 - DNA, 23 bp, Homo sapiens
  source 1..23: mol_type = genomic DNA
accgtggtggttgtggtgttggg

SEQ ID NO: 192 - DNA, 23 bp, Homo sapiens
  source 1..23: mol_type = genomic DNA
acctcaactgaaaatgaaaccgg

SEQ ID NO: 193 - DNA, 23 bp, Homo sapiens
  source 1..23: mol_type = genomic DNA
acctcaaggagtgggagcctggg

SEQ ID NO: 194 - DNA, 23 bp, Homo sapiens
  source 1..23: mol_type = genomic DNA
acctcatgaagtgggagcctggg

SEQ ID NO: 195 - DNA, 23 bp, Homo sapiens
  source 1..23: mol_type = genomic DNA
acctcatggagagggagcctggg

SEQ ID NO: 196 - DNA, 23 bp, Homo sapiens
  source 1..23: mol_type = genomic DNA
acctcatggagtaggagcctggg

SEQ ID NO: 197 - DNA, 23 bp, Homo sapiens
  source 1..23: mol_type = genomic DNA
acctcatggagtggaagcctggg

SEQ ID NO: 198 - DNA, 23 bp, Homo sapiens
  source 1..23: mol_type = genomic DNA
acctcatggagtgggaacctggg

SEQ ID NO: 199 - DNA, 23 bp, Homo sapiens
  source 1..23: mol_type = genomic DNA
acctcccggcgcggctccccggg

SEQ ID NO: 200 - DNA, 23 bp, Homo sapiens
  source 1..23: mol_type = genomic DNA
acctccctgcgccgctccccggg

SEQ ID NO: 201 - DNA, 23 bp, Homo sapiens
  source 1..23: mol_type = genomic DNA
acctctggtcctgacctgagtgg

SEQ ID NO: 202 - DNA, 23 bp, Homo sapiens
  source 1..23: mol_type = genomic DNA
acctgagctcctggcggacacgg

SEQ ID NO: 203 - DNA, 23 bp, Homo sapiens
  source 1..23: mol_type = genomic DNA
acctgcgctcctggaccgccggg

SEQ ID NO: 204 - DNA, 23 bp, Homo sapiens
  source 1..23: mol_type = genomic DNA
acctgcgctcctggacgcggcgg

SEQ ID NO: 205 - DNA, 23 bp, Homo sapiens
  source 1..23: mol_type = genomic DNA
acctggagggcctgtgcgtgggg

SEQ ID NO: 206 - DNA, 23 bp, Homo sapiens
  source 1..23: mol_type = genomic DNA
accttaatggttgtggtgttggg

SEQ ID NO: 207 - DNA, 23 bp, Homo sapiens
  source 1..23: mol_type = genomic DNA
accttgatattatggtgttgggg

SEQ ID NO: 208 - DNA, 23 bp, Homo sapiens
  source 1..23: mol_type = genomic DNA
accttggtggttgtggcgttggg

SEQ ID NO: 209 - DNA, 23 bp, Homo sapiens
  source 1..23: mol_type = genomic DNA
acgacgccgcgagtccgagaggg

SEQ ID NO: 210 - DNA, 23 bp, Homo sapiens
  source 1..23: mol_type = genomic DNA
acgaggacctgagctcctggcgg

SEQ ID NO: 211 - DNA, 23 bp, Homo sapiens
  source 1..23: mol_type = genomic DNA
acgatgtatggctgcgacatggg

SEQ ID NO: 212 - DNA, 23 bp, Homo sapiens
  source 1..23: mol_type = genomic DNA
acgcgggtaccaggggcagtggg

SEQ ID NO: 213 - DNA, 23 bp, Homo sapiens
  source 1..23: mol_type = genomic DNA
acgctgcagcgcgcgggtaccgg

SEQ ID NO: 214 - DNA, 23 bp, Homo sapiens
  source 1..23: mol_type = genomic DNA
acggacctggcagcgggatgggg

SEQ ID NO: 215 - DNA, 23 bp, Homo sapiens
  source 1..23: mol_type = genomic DNA
acggccattctcggcgtctgggg

SEQ ID NO: 216 - DNA, 23 bp, Homo sapiens
  source 1..23: mol_type = genomic DNA
acggccgggccgggacatggcgg

SEQ ID NO: 217 - DNA, 23 bp, Homo sapiens
  source 1..23: mol_type = genomic DNA
acggcggtgtagatacctcatgg

SEQ ID NO: 218 - DNA, 23 bp, Homo sapiens
  source 1..23: mol_type = genomic DNA
acggctctgggaaaaggggaagg

SEQ ID NO: 219 - DNA, 23 bp, Homo sapiens
  source 1..23: mol_type = genomic DNA
acggggctggccgcggggccggg

SEQ ID NO: 220 - DNA, 23 bp, Homo sapiens
  source 1..23: mol_type = genomic DNA
acggtgagtgaccccggcctggg

SEQ ID NO: 221 - DNA, 23 bp, Homo sapiens
  source 1..23: mol_type = genomic DNA
acggtgcccaaggctgctgcagg

SEQ ID NO: 222 - DNA, 23 bp, Homo sapiens
  source 1..23: mol_type = genomic DNA
acgtcatggagtgggagcctggg

SEQ ID NO: 223 - DNA, 23 bp, Homo sapiens
  source 1..23: mol_type = genomic DNA
acgtgccatgtgcagcatgaggg

SEQ ID NO: 224 - DNA, 23 bp, Homo sapiens
  source 1..23: mol_type = genomic DNA
acgtgcgtggagtggctccgcgg

SEQ ID NO: 225 - DNA, 23 bp, Homo sapiens
  source 1..23: mol_type = genomic DNA
acgttggacaggaggaattatgg

SEQ ID NO: 226 - DNA, 23 bp, Homo sapiens
  source 1..23: mol_type = genomic DNA
actacaaccagagcgaggccggg

SEQ ID NO: 227 - DNA, 23 bp, Homo sapiens
  source 1..23: mol_type = genomic DNA
actagaattctccacggaatagg

SEQ ID NO: 228 - DNA, 23 bp, Homo sapiens
  source 1..23: mol_type = genomic DNA
actagccgcgcagggtccccagg

SEQ ID NO: 229 - DNA, 23 bp, Homo sapiens
  source 1..23: mol_type = genomic DNA
actccacacacaggccctccagg

SEQ ID NO: 230 - DNA, 23 bp, Homo sapiens
  source 1..23: mol_type = genomic DNA
actccacacacgtgccctccagg

SEQ ID NO: 231 - DNA, 23 bp, Homo sapiens
  source 1..23: mol_type = genomic DNA
actccacgaacgtgccctccagg

SEQ ID NO: 232 - DNA, 23 bp, Homo sapiens
  source 1..23: mol_type = genomic DNA
actccacgaactcgccctccagg

SEQ ID NO: 233 - DNA, 23 bp, Homo sapiens
  source 1..23: mol_type = genomic DNA
actccacgcacagaccctccagg

SEQ ID NO: 234 - DNA, 23 bp, Homo sapiens
  source 1..23: mol_type = genomic DNA
actccacgcacaggccctcccgg

SEQ ID NO: 235 - DNA, 23 bp, Homo sapiens
  source 1..23: mol_type = genomic DNA
actccacgcacgtgcccaccagg

SEQ ID NO: 236 - DNA, 23 bp, Homo sapiens
  source 1..23: mol_type = genomic DNA
actccacgcacgtgtcctccagg

SEQ ID NO: 237 - DNA, 23 bp, Homo sapiens
  source 1..23: mol_type = genomic DNA
actccacgcacgttccctccagg

SEQ ID NO: 238 - DNA, 23 bp, Homo sapiens
  source 1..23: mol_type = genomic DNA
actccacgcacttgccctccagg

SEQ ID NO: 239 - DNA, 23 bp, Homo sapiens
  source 1..23: mol_type = genomic DNA
actccacgcgcgtgccctccagg

SEQ ID NO: 240 - DNA, 23 bp, Homo sapiens
  source 1..23: mol_type = genomic DNA
actccacgtacgtgccctccagg

SEQ ID NO: 241 - DNA, 23 bp, Homo sapiens
  source 1..23: mol_type = genomic DNA
actccactcacgtgccctccagg

SEQ ID NO: 242 - DNA, 23 bp, Homo sapiens
  source 1..23: mol_type = genomic DNA
actccatgcacgtgccctccagg

SEQ ID NO: 243 - DNA, 23 bp, Homo sapiens
  source 1..23: mol_type = genomic DNA
actcctcgcacaggccctccagg

SEQ ID NO: 244 - DNA, 23 bp, Homo sapiens
  source 1..23: mol_type = genomic DNA
actcctttctgggatctcacagg

SEQ ID NO: 245 - DNA, 23 bp, Homo sapiens
  source 1..23: mol_type = genomic DNA
actctcctcctgctgctctcggg

SEQ ID NO: 246 - DNA, 23 bp, Homo sapiens
  source 1..23: mol_type = genomic DNA
actctgaggtgctgggccctggg

SEQ ID NO: 247 - DNA, 23 bp, Homo sapiens
  source 1..23: mol_type = genomic DNA
actgacctgacagcgggatgggg

SEQ ID NO: 248 - DNA, 23 bp, Homo sapiens
  source 1..23: mol_type = genomic DNA
actgacctggcagcgggataggg

SEQ ID NO: 249 - DNA, 23 bp, Homo sapiens
  source 1..23: mol_type = genomic DNA
actgatcatacccgcggaggagg

SEQ ID NO: 250 - DNA, 23 bp, Homo sapiens
  source 1..23: mol_type = genomic DNA
actgatctggcagtgggatgggg

SEQ ID NO: 251 - DNA, 23 bp, Homo sapiens
  source 1..23: mol_type = genomic DNA
actggacatacccgcggaggagg

SEQ ID NO: 252 - DNA, 23 bp, Homo sapiens
  source 1..23: mol_type = genomic DNA
actggccatacccgcggaggagg

SEQ ID NO: 253 - DNA, 23 bp, Homo sapiens
  source 1..23: mol_type = genomic DNA
actgggctgaccacgggggcggg

SEQ ID NO: 254 - DNA, 23 bp, Homo sapiens
  source 1..23: mol_type = genomic DNA
actgggctgaccgcgagggctgg

SEQ ID NO: 255 - DNA, 23 bp, Homo sapiens
  source 1..23: mol_type = genomic DNA
actggttatacccgtggaggagg

SEQ ID NO: 256 - DNA, 23 bp, Homo sapiens
  source 1..23: mol_type = genomic DNA
actggttatgcccacggaggagg

SEQ ID NO: 257 - DNA, 23 bp, Homo sapiens
  source 1..23: mol_type = genomic DNA
acttcatggagtgggaggctggg

SEQ ID NO: 258 - DNA, 23 bp, Homo sapiens
  source 1..23: mol_type = genomic DNA
acttctgttcctgatctgagtgg

SEQ ID NO: 259 - DNA, 23 bp, Homo sapiens
  source 1..23: mol_type = genomic DNA
acttcttctcccaacttgtgggg

SEQ ID NO: 260 - DNA, 23 bp, Homo sapiens
  source 1..23: mol_type = genomic DNA
acttgtggggtccttcttccagg

SEQ ID NO: 261 - DNA, 23 bp, Homo sapiens
  source 1..23: mol_type = genomic DNA
actttacctctactcagatcagg

SEQ ID NO: 262 - DNA, 23 bp, Homo sapiens
  source 1..23: mol_type = genomic DNA
agaacaaggcctgagaggaaagg

SEQ ID NO: 263 - DNA, 23 bp, Homo sapiens
  source 1..23: mol_type = genomic DNA
agaacctagcccggaccccgcgg

SEQ ID NO: 264 - DNA, 23 bp, Homo sapiens
  source 1..23: mol_type = genomic DNA
agaacctggccccggccccgcgg

SEQ ID NO: 265 - DNA, 23 bp, Homo sapiens
  source 1..23: mol_type = genomic DNA
agaacctggcctcgaccccgcgg

SEQ ID NO: 266 - DNA, 23 bp, Homo sapiens
  source 1..23: mol_type = genomic DNA
agaaggaggggccggagtattgg

SEQ ID NO: 267 - DNA, 23 bp, Homo sapiens
  source 1..23: mol_type = genomic DNA
agaagtgaaactcagggaagtgg

SEQ ID NO: 268 - DNA, 23 bp, Homo sapiens
  source 1..23: mol_type = genomic DNA
agaagtgaaactcttgggagtgg

SEQ ID NO: 269 - DNA, 23 bp, Homo sapiens
  source 1..23: mol_type = genomic DNA
agaattctagtccctgaagaggg

SEQ ID NO: 270 - DNA, 23 bp, Homo sapiens
  source 1..23: mol_type = genomic DNA
agacactgagagccccgtccggg

SEQ ID NO: 271 - DNA, 23 bp, Homo sapiens
  source 1..23: mol_type = genomic DNA
agaccaggcctgccaggggatgg

SEQ ID NO: 272 - DNA, 23 bp, Homo sapiens
  source 1..23: mol_type = genomic DNA
agaccctggcccagccctcgcgg

SEQ ID NO: 273 - DNA, 23 bp, Homo sapiens
  source 1..23: mol_type = genomic DNA
agaccctggcccggaccccgcgg

SEQ ID NO: 274 - DNA, 23 bp, Homo sapiens
  source 1..23: mol_type = genomic DNA
agaccctggcctaggccccgcgg

SEQ ID NO: 275 - DNA, 23 bp, Homo sapiens
  source 1..23: mol_type = genomic DNA
agacgaagcggggctctccgcgg

SEQ ID NO: 276 - DNA, 23 bp, Homo sapiens
  source 1..23: mol_type = genomic DNA
agacggatgtatcaccttaatgg

SEQ ID NO: 277 - DNA, 23 bp, Homo sapiens
  source 1..23: mol_type = genomic DNA
agacggctccgggaaaggaaggg

SEQ ID NO: 278 - DNA, 23 bp, Homo sapiens
  source 1..23: mol_type = genomic DNA
agactgaccgaatgaacctgcgg

SEQ ID NO: 279 - DNA, 23 bp, Homo sapiens
  source 1..23: mol_type = genomic DNA
agactgaccgagagaaactgcgg

SEQ ID NO: 280 - DNA, 23 bp, Homo sapiens
  source 1..23: mol_type = genomic DNA
agactgaccgagtgggcctgcgg

SEQ ID NO: 281 - DNA, 23 bp, Homo sapiens
  source 1..23: mol_type = genomic DNA
agactgacggagagagcctgcgg

SEQ ID NO: 282 - DNA, 23 bp, Homo sapiens
  source 1..23: mol_type = genomic DNA
agacttaacgagagagcctgcgg

SEQ ID NO: 283 - DNA, 23 bp, Homo sapiens
  source 1..23: mol_type = genomic DNA
agacttaccgagagaacctgagg

SEQ ID NO: 284 - DNA, 23 bp, Homo sapiens
  source 1..23: mol_type = genomic DNA
agagagtgactctgaggttccgg

SEQ ID NO: 285 - DNA, 23 bp, Homo sapiens
  source 1..23: mol_type = genomic DNA
agagcaccgcttcatctcagtgg

SEQ ID NO: 286 - DNA, 23 bp, Homo sapiens
  source 1..23: mol_type = genomic DNA
agagcagagatacacatgccagg

SEQ ID NO: 287 - DNA, 23 bp, Homo sapiens
  source 1..23: mol_type = genomic DNA
agagcagcaggaggagagttcgg

SEQ ID NO: 288 - DNA, 23 bp, Homo sapiens
  source 1..23: mol_type = genomic DNA
agagcagttgagagcctacctgg

SEQ ID NO: 289 - DNA, 23 bp, Homo sapiens
  source 1..23: mol_type = genomic DNA
agagccccaaacactgagtgtgg

SEQ ID NO: 290 - DNA, 23 bp, Homo sapiens
  source 1..23: mol_type = genomic DNA
agagccccgcttcgtctcagtgg

SEQ ID NO: 291 - DNA, 23 bp, Homo sapiens
  source 1..23: mol_type = genomic DNA
agagcgcaggtcgtctttcaggg

SEQ ID NO: 292 - DNA, 23 bp, Homo sapiens
  source 1..23: mol_type = genomic DNA
agagctcaggtggaaaaggaggg

SEQ ID NO: 293 - DNA, 23 bp, Homo sapiens
  source 1..23: mol_type = genomic DNA
agaggagccgcgggcgccgtggg

SEQ ID NO: 294 - DNA, 23 bp, Homo sapiens
  source 1..23: mol_type = genomic DNA
agaggagggaggggccctcccgg

SEQ ID NO: 295 - DNA, 23 bp, Homo sapiens
  source 1..23: mol_type = genomic DNA
agaggcccttgaagtcacaaagg

SEQ ID NO: 296 - DNA, 23 bp, Homo sapiens
  source 1..23: mol_type = genomic DNA
agagtcccgcttcatctcagtgg

SEQ ID NO: 297 - DNA, 23 bp, Homo sapiens
  source 1..23: mol_type = genomic DNA
agagtgggcaggggggtggtggg

SEQ ID NO: 298 - DNA, 23 bp, Homo sapiens
  source 1..23: mol_type = genomic DNA
agagtgggcggggggggggtggg

SEQ ID NO: 299 - DNA, 23 bp, Homo sapiens
  source 1..23: mol_type = genomic DNA
agagtgtgagaccctggccccgg

SEQ ID NO: 300 - DNA, 23 bp, Homo sapiens
  source 1..23: mol_type = genomic DNA
agatcacacggacctggcagcgg

SEQ ID NO: 301 - DNA, 23 bp, Homo sapiens
  source 1..23: mol_type = genomic DNA
agatcacactgacctgacagcgg

SEQ ID NO: 302 - DNA, 23 bp, Homo sapiens
  source 1..23: mol_type = genomic DNA
agatcacactgacctggtagcgg

SEQ ID NO: 303 - DNA, 23 bp, Homo sapiens
  source 1..23: mol_type = genomic DNA
agatcacactgatctggcagtgg

SEQ ID NO: 304 - DNA, 23 bp, Homo sapiens
  source 1..23: mol_type = genomic DNA
agatcagtgtgatctccgcaggg

SEQ ID NO: 305 - DNA, 23 bp, Homo sapiens
  source 1..23: mol_type = genomic DNA
agatccaccccgaagccgcgggg

SEQ ID NO: 306 - DNA, 23 bp, Homo sapiens
  source 1..23: mol_type = genomic DNA
agatccgccccctgaggccgcgg

SEQ ID NO: 307 - DNA, 23 bp, Homo sapiens
  source 1..23: mol_type = genomic DNA
agatgaagcgggactctccgcgg

SEQ ID NO: 308 - DNA, 23 bp, Homo sapiens
  source 1..23: mol_type = genomic DNA
agatgaagcggtgctctccgcgg

SEQ ID NO: 309 - DNA, 23 bp, Homo sapiens
  source 1..23: mol_type = genomic DNA
agatgggataaggagggagatgg

SEQ ID NO: 310 - DNA, 23 bp, Homo sapiens
  source 1..23: mol_type = genomic DNA
agatgggttaaggagggagatgg

SEQ ID NO: 311 - DNA, 23 bp, Homo sapiens
  source 1..23: mol_type = genomic DNA
agattctcccccagacgccgagg

SEQ ID NO: 312 - DNA, 23 bp, Homo sapiens
  source 1..23: mol_type = genomic DNA
agcacagggcccagcacctcagg

SEQ ID NO: 313 - DNA, 23 bp, Homo sapiens
  source 1..23: mol_type = genomic DNA
agcagagaacagggcctgagagg

SEQ ID NO: 314 - DNA, 23 bp, Homo sapiens
  source 1..23: mol_type = genomic DNA
agcagagaacgaggcctgagagg

SEQ ID NO: 315 - DNA, 23 bp, Homo sapiens
  source 1..23: mol_type = genomic DNA
agcagcaggaggagagttcgggg

SEQ ID NO: 316 - DNA, 23 bp, Homo sapiens
  source 1..23: mol_type = genomic DNA
agcagcaggatgagggttcaggg

SEQ ID NO: 317 - DNA, 23 bp, Homo sapiens
  source 1..23: mol_type = genomic DNA
agcaggaggggccagagtattgg

SEQ ID NO: 318 - DNA, 23 bp, Homo sapiens
  source 1..23: mol_type = genomic DNA
agcaggaggggccggagcattgg

SEQ ID NO: 319 - DNA, 23 bp, Homo sapiens
  source 1..23: mol_type = genomic DNA
agcaggaggggccggagtactgg

SEQ ID NO: 320 - DNA, 23 bp, Homo sapiens
  source 1..23: mol_type = genomic DNA
agcaggaggggccggagtgttgg

SEQ ID NO: 321 - DNA, 23 bp, Homo sapiens
  source 1..23: mol_type = genomic DNA
agcaggaggggctggagtattgg

SEQ ID NO: 322 - DNA, 23 bp, Homo sapiens
  source 1..23: mol_type = genomic DNA
agcaggaggtgccggaggattgg

SEQ ID NO: 323 - DNA, 23 bp, Homo sapiens
  source 1..23: mol_type = genomic DNA
agcatgtacggctgcgacctggg

SEQ ID NO: 324 - DNA, 23 bp, Homo sapiens
  source 1..23: mol_type = genomic DNA
agcatgtatggctgcgacgtggg

SEQ ID NO: 325 - DNA, 23 bp, Homo sapiens
  source 1..23: mol_type = genomic DNA
agcattcatgagtcgggggaagg

SEQ ID NO: 326 - DNA, 23 bp, Homo sapiens
  source 1..23: mol_type = genomic DNA
agccactccacaggtatctgcgg

SEQ ID NO: 327 - DNA, 23 bp, Homo sapiens
  source 1..23: mol_type = genomic DNA
agccatggatagagcaggagggg

SEQ ID NO: 328 - DNA, 23 bp, Homo sapiens
  source 1..23: mol_type = genomic DNA
agcccatggcccagcacctcagg

SEQ ID NO: 329 - DNA, 23 bp, Homo sapiens
  source 1..23: mol_type = genomic DNA
agccccaaacactgagtgtgggg

SEQ ID NO: 330 - DNA, 23 bp, Homo sapiens
  source 1..23: mol_type = genomic DNA
agcccctcctgctctatccatgg

SEQ ID NO: 331 - DNA, 23 bp, Homo sapiens
  source 1..23: mol_type = genomic DNA
agccgcctcccacttgcgctggg

SEQ ID NO: 332 - DNA, 23 bp, Homo sapiens
  source 1..23: mol_type = genomic DNA
agccgcgccgggaggtgggtcgg

SEQ ID NO: 333 - DNA, 23 bp, Homo sapiens
  source 1..23: mol_type = genomic DNA
agccgcgccggtaggagggtcgg

SEQ ID NO: 334 - DNA, 23 bp, Homo sapiens
  source 1..23: mol_type = genomic DNA
agccgtggatggagcaggagggg

SEQ ID NO: 335 - DNA, 23 bp, Homo sapiens
  source 1..23: mol_type = genomic DNA
agcgaccccgcgagtccgagagg

SEQ ID NO: 336 - DNA, 23 bp, Homo sapiens
  source 1..23: mol_type = genomic DNA
agcgacgccgcaagtccgagagg

SEQ ID NO: 337 - DNA, 23 bp, Homo sapiens
  source 1..23: mol_type = genomic DNA
agcgacgccgcgagtccgagggg

SEQ ID NO: 338 - DNA, 23 bp, Homo sapiens
  source 1..23: mol_type = genomic DNA
agcgactccgcgagtccaagagg

SEQ ID NO: 339 - DNA, 23 bp, Homo sapiens
  source 1..23: mol_type = genomic DNA
agcgcaagtgggaggcggcccgg

SEQ ID NO: 340 - DNA, 23 bp, Homo sapiens
  source 1..23: mol_type = genomic DNA
agcgcgatccgcagttctctcgg

SEQ ID NO: 341 - DNA, 23 bp, Homo sapiens
  source 1..23: mol_type = genomic DNA
agcgcgggtaccaggggcagtgg

SEQ ID NO: 342 - DNA, 23 bp, Homo sapiens
  source 1..23: mol_type = genomic DNA
agcggcctctgcggagaggaggg

SEQ ID NO: 343 - DNA, 23 bp, Homo sapiens
  source 1..23: mol_type = genomic DNA
agcggcgcagggaggagggtcgg

SEQ ID NO: 344 - DNA, 23 bp, Homo sapiens
  source 1..23: mol_type = genomic DNA
agcggcgcagggaggtgggtcgg

SEQ ID NO: 345 - DNA, 23 bp, Homo sapiens
  source 1..23: mol_type = genomic DNA
agcggtgtagaaatacttcatgg

SEQ ID NO: 346 - DNA, 23 bp, Homo sapiens
  source 1..23: mol_type = genomic DNA
agctacgccgcgagtccaagagg

SEQ ID NO: 347 - DNA, 23 bp, Homo sapiens
  source 1..23: mol_type = genomic DNA
agctcaggtagggaaggggtggg

SEQ ID NO: 348 - DNA, 23 bp, Homo sapiens
  source 1..23: mol_type = genomic DNA
agctgccgcagtggtcgaagtgg

SEQ ID NO: 349 - DNA, 23 bp, Homo sapiens
  source 1..23: mol_type = genomic DNA
agcttgtacggctgcgacgtggg

SEQ ID NO: 350 - DNA, 23 bp, Homo sapiens
  source 1..23: mol_type = genomic DNA
aggaaaagtcacggtgcccaagg

SEQ ID NO: 351 - DNA, 23 bp, Homo sapiens
  source 1..23: mol_type = genomic DNA
aggaaaggtcacggttcccaagg

SEQ ID NO: 352 - DNA, 23 bp, Homo sapiens
  source 1..23: mol_type = genomic DNA
aggaacgcagatcctcgttcagg

SEQ ID NO: 353 - DNA, 23 bp, Homo sapiens
  source 1..23: mol_type = genomic DNA
aggaagagctcaggtggaaaagg

SEQ ID NO: 354 - DNA, 23 bp, Homo sapiens
  source 1..23: mol_type = genomic DNA
aggaagagttctggtagggaagg

SEQ ID NO: 355 - DNA, 23 bp, Homo sapiens
  source 1..23: mol_type = genomic DNA
aggacccgggaagccgcgcaggg

SEQ ID NO: 356 - DNA, 23 bp, Homo sapiens
  source 1..23: mol_type = genomic DNA
aggacctgcgctcctggacgcgg

SEQ ID NO: 357 - DNA, 23 bp, Homo sapiens
  source 1..23: mol_type = genomic DNA
aggacggtgaccccggcccgggg

SEQ ID NO: 358 - DNA, 23 bp, Homo sapiens
  source 1..23: mol_type = genomic DNA
aggagacccgggccgtacgtcgg

SEQ ID NO: 359 - DNA, 23 bp, Homo sapiens
  source 1..23: mol_type = genomic DNA
aggagcctgggggcgaggagtgg

SEQ ID NO: 360 - DNA, 23 bp, Homo sapiens
  source 1..23: mol_type = genomic DNA
aggagcgcaggtcctcgtccagg

SEQ ID NO: 361 - DNA, 23 bp, Homo sapiens
  source 1..23: mol_type = genomic DNA
aggagcttaggtcctcgttcagg

SEQ ID NO: 362 - DNA, 23 bp, Homo sapiens
  source 1..23: mol_type = genomic DNA
aggaggcgcccgtcgggcccagg

SEQ ID NO: 363 - DNA, 23 bp, Homo sapiens
  source 1..23: mol_type = genomic DNA
aggaggcgcccgtcgggccccgg

SEQ ID NO: 364 - DNA, 23 bp, Homo sapiens
  source 1..23: mol_type = genomic DNA
aggagggcaggtcctcgttcagg

SEQ ID NO: 365 - DNA, 23 bp, Homo sapiens
  source 1..23: mol_type = genomic DNA
aggagtactggttatgcccgcgg

SEQ ID NO: 366 - DNA, 23 bp, Homo sapiens
  source 1..23: mol_type = genomic DNA
aggatggagccgcgagccagagg

SEQ ID NO: 367 - DNA, 23 bp, Homo sapiens
  source 1..23: mol_type = genomic DNA
aggatgtaaggctgcgacgtggg

SEQ ID NO: 368 - DNA, 23 bp, Homo sapiens
  source 1..23: mol_type = genomic DNA
aggatgtacggctgggacctggg

SEQ ID NO: 369 - DNA, 23 bp, Homo sapiens
  source 1..23: mol_type = genomic DNA
aggatgtatggttgcgacgtggg

SEQ ID NO: 370 - DNA, 23 bp, Homo sapiens
  source 1..23: mol_type = genomic DNA
aggatgtctggctgcgacccggg

SEQ ID NO: 371 - DNA, 23 bp, Homo sapiens
  source 1..23: mol_type = genomic DNA
aggcaaactggttatgcccgcgg

SEQ ID NO: 372 - DNA, 23 bp, Homo sapiens
  source 1..23: mol_type = genomic DNA
aggcacctgggcctctcccgggg

SEQ ID NO: 373 - DNA, 23 bp, Homo sapiens
  source 1..23: mol_type = genomic DNA
aggcagggccatgtgattttagg

SEQ ID NO: 374 - DNA, 23 bp, Homo sapiens
  source 1..23: mol_type = genomic DNA
aggcataatgtgaggagataggg

SEQ ID NO: 375 - DNA, 23 bp, Homo sapiens
  source 1..23: mol_type = genomic DNA
aggcataatgtgaggagggtggg

SEQ ID NO: 376 - DNA, 23 bp, Homo sapiens
  source 1..23: mol_type = genomic DNA
aggcatactgctcatacccgcgg

SEQ ID NO: 377 - DNA, 23 bp, Homo sapiens
  source 1..23: mol_type = genomic DNA
aggccaaaaatccccctggttgg

SEQ ID NO: 378 - DNA, 23 bp, Homo sapiens
  source 1..23: mol_type = genomic DNA
aggcccaggcgcctttaacccgg

SEQ ID NO: 379 - DNA, 23 bp, Homo sapiens
  source 1..23: mol_type = genomic DNA
aggcccttgaagtcacaaagggg

SEQ ID NO: 380 - DNA, 23 bp, Homo sapiens
  source 1..23: mol_type = genomic DNA
aggccgcctcccacttgcgctgg

SEQ ID NO: 381 - DNA, 23 bp, Homo sapiens
  source 1..23: mol_type = genomic DNA
aggcctcatcccccacggacggg

SEQ ID NO: 382 - DNA, 23 bp, Homo sapiens
  source 1..23: mol_type = genomic DNA
aggcctgagaggaaaggtcacgg

SEQ ID NO: 383 - DNA, 23 bp, Homo sapiens
  source 1..23: mol_type = genomic DNA
aggcgaactggtggtacccgcgg

SEQ ID NO: 384 - DNA, 23 bp, Homo sapiens
  source 1..23: mol_type = genomic DNA
aggcgaactggttatacccgtgg

SEQ ID NO: 385 - DNA, 23 bp, Homo sapiens
  source 1..23: mol_type = genomic DNA
aggcgacctgccggtacccgcgg

SEQ ID NO: 386 - DNA, 23 bp, Homo sapiens
  source 1..23: mol_type = genomic DNA
aggcggaccggtcatacccgcgg

SEQ ID NO: 387 - DNA, 23 bp, Homo sapiens
  source 1..23: mol_type = genomic DNA
aggcggactgatcatacccgcgg

SEQ ID NO: 388 - DNA, 23 bp, Homo sapiens
  source 1..23: mol_type = genomic DNA
aggcggactggccatacccgcgg

SEQ ID NO: 389 - DNA, 23 bp, Homo sapiens
  source 1..23: mol_type = genomic DNA
aggcgtactggacatacccgcgg

SEQ ID NO: 390 - DNA, 23 bp, Homo sapiens
  source 1..23: mol_type = genomic DNA
aggcgtactggttatacccgcgg

SEQ ID NO: 391 - DNA, 23 bp, Homo sapiens
  source 1..23: mol_type = genomic DNA
aggcgtagtggtggtacccgcgg

SEQ ID NO: 392 - DNA, 23 bp, Homo sapiens
  source 1..23: mol_type = genomic DNA
aggcgtcctggttatgcccgcgg

SEQ ID NO: 393 - DNA, 23 bp, Homo sapiens
  source 1..23: mol_type = genomic DNA
aggcgtgctgccggtacccgcgg

SEQ ID NO: 394 - DNA, 23 bp, Homo sapiens
  source 1..23: mol_type = genomic DNA
aggctaactggttatgcccacgg

SEQ ID NO: 395 - DNA, 23 bp, Homo sapiens
  source 1..23: mol_type = genomic DNA
aggctgaccgagagagcctgcgg

SEQ ID NO: 396 - DNA, 23 bp, Homo sapiens
  source 1..23: mol_type = genomic DNA
aggctgcatgtaagtgatggcgg

SEQ ID NO: 397 - DNA, 23 bp, Homo sapiens
  source 1..23: mol_type = genomic DNA
aggctgcgtgtaaatgatggcgg

SEQ ID NO: 398 - DNA, 23 bp, Homo sapiens
  source 1..23: mol_type = genomic DNA
aggctgcgtgtaagtgatgccgg

SEQ ID NO: 399 - DNA, 23 bp, Homo sapiens
  source 1..23: mol_type = genomic DNA
aggctgctgacttttctctcagg

SEQ ID NO: 400 - DNA, 23 bp, Homo sapiens
  source 1..23: mol_type = genomic DNA
agggagcctgggggcgaggaggg

SEQ ID NO: 401 - DNA, 23 bp, Homo sapiens
  source 1..23: mol_type = genomic DNA
agggaggggccctcccggcgagg

SEQ ID NO: 402 - DNA, 23 bp, Homo sapiens
  source 1..23: mol_type = genomic DNA
agggctccccgcggccgggccgg

SEQ ID NO: 403 - DNA, 23 bp, Homo sapiens
  source 1..23: mol_type = genomic DNA
aggggagccgcaggcgccgtggg

SEQ ID NO: 404 - DNA, 23 bp, Homo sapiens
  source 1..23: mol_type = genomic DNA
aggggccagagtattgggaccgg

SEQ ID NO: 405 - DNA, 23 bp, Homo sapiens
  source 1..23: mol_type = genomic DNA
aggggccccgaccctgctgaagg

SEQ ID NO: 406 - DNA, 23 bp, Homo sapiens
  source 1..23: mol_type = genomic DNA
aggggccggaatattgggacggg

SEQ ID NO: 407 - DNA, 23 bp, Homo sapiens
  source 1..23: mol_type = genomic DNA
aggggccggagcattgggaccgg

SEQ ID NO: 408 - DNA, 23 bp, Homo sapiens
  source 1..23: mol_type = genomic DNA
aggggccggagtactgggaccgg

SEQ ID NO: 409 - DNA, 23 bp, Homo sapiens
  source 1..23: mol_type = genomic DNA
aggggccggagtattaggaccgg

SEQ ID NO: 410 - DNA, 23 bp, Homo sapiens
  source 1..23: mol_type = genomic DNA
aggggccggagtgttgggaccgg

SEQ ID NO: 411 - DNA, 23 bp, Homo sapiens
  source 1..23: mol_type = genomic DNA
aggggctctgaccctgataaagg

SEQ ID NO: 412 - DNA, 23 bp, Homo sapiens
  source 1..23: mol_type = genomic DNA
aggggctctgaccctgctaaagg

SEQ ID NO: 413 - DNA, 23 bp, Homo sapiens
  source 1..23: mol_type = genomic DNA
aggggctggagtattgggaccgg

SEQ ID NO: 414 - DNA, 23 bp, Homo sapiens
  source 1..23: mol_type = genomic DNA
agggggaaaggcctgggtaatgg

SEQ ID NO: 415 - DNA, 23 bp, Homo sapiens
  source 1..23: mol_type = genomic DNA
aggggggtggtggggcagagggg

SEQ ID NO: 416 - DNA, 23 bp, Homo sapiens
  source 1..23: mol_type = genomic DNA
aggggtggggagtggggtctggg

SEQ ID NO: 417 - DNA, 23 bp, Homo sapiens
  source 1..23: mol_type = genomic DNA
agggtatgagaccctggccccgg

SEQ ID NO: 418 - DNA, 23 bp, Homo sapiens
  source 1..23: mol_type = genomic DNA
agggtgtgagaccctggcctagg

SEQ ID NO: 419 - DNA, 23 bp, Homo sapiens
  source 1..23: mol_type = genomic DNA
agggtttttcaagtcacaaaggg

SEQ ID NO: 420 - DNA, 23 bp, Homo sapiens
  source 1..23: mol_type = genomic DNA
aggtatctgcggtgccctccagg

SEQ ID NO: 421 - DNA, 23 bp, Homo sapiens
  source 1..23: mol_type = genomic DNA
aggtcaaaatccccgcgggttgg

SEQ ID NO: 422 - DNA, 23 bp, Homo sapiens
  source 1..23: mol_type = genomic DNA
aggtccgtgtgatctccgcaggg

SEQ ID NO: 423 - DNA, 23 bp, Homo sapiens
  source 1..23: mol_type = genomic DNA
aggtcgctgttccctcctcaggg

SEQ ID NO: 424 - DNA, 23 bp, Homo sapiens
  source 1..23: mol_type = genomic DNA
aggtgccggaggattgggaccgg

SEQ ID NO: 425 - DNA, 23 bp, Homo sapiens
  source 1..23: mol_type = genomic DNA
aggtgggtgagctcccccatggg

SEQ ID NO: 426 - DNA, 23 bp, Homo sapiens
  source 1..23: mol_type = genomic DNA
agtacccgcgcagggtccccagg

SEQ ID NO: 427 - DNA, 23 bp, Homo sapiens
  source 1..23: mol_type = genomic DNA
agtactggttatgcccgcggagg

SEQ ID NO: 428 - DNA, 23 bp, Homo sapiens
  source 1..23: mol_type = genomic DNA
agtagccaagcaggttccgcagg

SEQ ID NO: 429 - DNA, 23 bp, Homo sapiens
  source 1..23: mol_type = genomic DNA
agtagccgcgcaggatccgcagg

SEQ ID NO: 430 - DNA, 23 bp, Homo sapiens
  source 1..23: mol_type = genomic DNA
agtagccgcgcaggtttcgcagg

SEQ ID NO: 431 - DNA, 23 bp, Homo sapiens
  source 1..23: mol_type = genomic DNA
agtagccgcgcagttgccgcagg

SEQ ID NO: 432 - DNA, 23 bp, Homo sapiens
  source 1..23: mol_type = genomic DNA
agtagccgtgcagggtccccagg

SEQ ID NO: 433 - DNA, 23 bp, Homo sapiens
  source 1..23: mol_type = genomic DNA
agtagcggagcgcgatcctcagg

SEQ ID NO: 434 - DNA, 23 bp, Homo sapiens
  source 1..23: mol_type = genomic DNA
agtattgggaccaggagacgcgg

SEQ ID NO: 435 - DNA, 23 bp, Homo sapiens
  source 1..23: mol_type = genomic DNA
agtcatatgcgtcttgggggggg

SEQ ID NO: 436 - DNA, 23 bp, Homo sapiens
  source 1..23: mol_type = genomic DNA
agtccctataatactgatcaggg

SEQ ID NO: 437 - DNA, 23 bp, Homo sapiens
  source 1..23: mol_type = genomic DNA
agtccgagaaggggagccgcggg

SEQ ID NO: 438 - DNA, 23 bp, Homo sapiens
  source 1..23: mol_type = genomic DNA
agtgccatgttcagcacgagggg

SEQ ID NO: 439 - DNA, 23 bp, Homo sapiens
  source 1..23: mol_type = genomic DNA
agtggccgcgcaggttccgcagg

SEQ ID NO: 440 - DNA, 23 bp, Homo sapiens
  source 1..23: mol_type = genomic DNA
agtggccgcgcagtttccgcagg

SEQ ID NO: 441 - DNA, 23 bp, Homo sapiens
  source 1..23: mol_type = genomic DNA
agtggctccgcagatacctgggg

SEQ ID NO: 442 - DNA, 23 bp, Homo sapiens
  source 1..23: mol_type = genomic DNA
agtgggagactccgcccatgagg

SEQ ID NO: 443 - DNA, 23 bp, Homo sapiens
  source 1..23: mol_type = genomic DNA
agtggtcgaagtggtcaaagggg

SEQ ID NO: 444 - DNA, 23 bp, Homo sapiens
  source 1..23: mol_type = genomic DNA
agtgtgacccctcactgtgatgg

SEQ ID NO: 445 - DNA, 23 bp, Homo sapiens
  source 1..23: mol_type = genomic DNA
agttgaggtcaaaatccccgcgg

SEQ ID NO: 446 - DNA, 23 bp, Homo sapiens
  source 1..23: mol_type = genomic DNA
agttggggaatctccaaggctgg

SEQ ID NO: 447 - DNA, 23 bp, Homo sapiens
  source 1..23: mol_type = genomic DNA
atacttctggaaattctttttgg

SEQ ID NO: 448 - DNA, 23 bp, Homo sapiens
  source 1..23: mol_type = genomic DNA
atagcccacggtgatgaagcggg

SEQ ID NO: 449 - DNA, 23 bp, Homo sapiens
  source 1..23: mol_type = genomic DNA
atatcggacccggagactgtggg

SEQ ID NO: 450 - DNA, 23 bp, Homo sapiens
  source 1..23: mol_type = genomic DNA
atcctctggatgtgagaccctgg

SEQ ID NO: 451 - DNA, 23 bp, Homo sapiens
  source 1..23: mol_type = genomic DNA
atctcggaccctgagactcgggg

SEQ ID NO: 452 - DNA, 23 bp, Homo sapiens
  source 1..23: mol_type = genomic DNA
atctcggacctagagactcgagg

SEQ ID NO: 453 - DNA, 23 bp, Homo sapiens
  source 1..23: mol_type = genomic DNA
atctgcggtgccctccaggtagg

SEQ ID NO: 454 - DNA, 23 bp, Homo sapiens
  source 1..23: mol_type = genomic DNA
atgaacctgcggaaactgcgcgg

SEQ ID NO: 455 - DNA, 23 bp, Homo sapiens
  source 1..23: mol_type = genomic DNA
atgaggcctgcgccccgggccgg

SEQ ID NO: 456 - DNA, 23 bp, Homo sapiens
  source 1..23: mol_type = genomic DNA
atgaggggcttcggtaaggaggg

SEQ ID NO: 457 - DNA, 23 bp, Homo sapiens
  source 1..23: mol_type = genomic DNA
atggatagagcaggaggggctgg

SEQ ID NO: 458 - DNA, 23 bp, Homo sapiens
  source 1..23: mol_type = genomic DNA
atggatagagcaggaggtgccgg

SEQ ID NO: 459 - DNA, 23 bp, Homo sapiens
  source 1..23: mol_type = genomic DNA
atggccatcctcggcgtctgggg

SEQ ID NO: 460 - DNA, 23 bp, Homo sapiens
  source 1..23: mol_type = genomic DNA
atggctcccatctcagggtgagg

SEQ ID NO: 461 - DNA, 23 bp, Homo sapiens
  source 1..23: mol_type = genomic DNA
atgggaggcggcccgtgtggcgg

SEQ ID NO: 462 - DNA, 23 bp, Homo sapiens
  source 1..23: mol_type = genomic DNA
atgggataaggagggagatgggg

SEQ ID NO: 463 - DNA, 23 bp, Homo sapiens
  source 1..23: mol_type = genomic DNA
atgggttaaggagggagatgggg

SEQ ID NO: 464 - DNA, 23 bp, Homo sapiens
  source 1..23: mol_type = genomic DNA
atggtgtgagaacctggccccgg

SEQ ID NO: 465 - DNA, 23 bp, Homo sapiens
  source 1..23: mol_type = genomic DNA
atgtaatcccttgccgtcgtagg

SEQ ID NO: 466 - DNA, 23 bp, Homo sapiens
  source 1..23: mol_type = genomic DNA
atgtacagcatgaggggcttcgg

SEQ ID NO: 467 - DNA, 23 bp, Homo sapiens
  source 1..23: mol_type = genomic DNA
atgtatcaccgtggtggttgtgg

SEQ ID NO: 468 - DNA, 23 bp, Homo sapiens
  source 1..23: mol_type = genomic DNA
atgtatcaccttaatggttgtgg

SEQ ID NO: 469 - DNA, 23 bp, Homo sapiens
  source 1..23: mol_type = genomic DNA
atgtgtaggaggaagagttctgg

SEQ ID NO: 470 - DNA, 23 bp, Homo sapiens
  source 1..23: mol_type = genomic DNA
attaagggatgacatctctgagg

SEQ ID NO: 471 - DNA, 23 bp, Homo sapiens
  source 1..23: mol_type = genomic DNA
attaagggatggcgtctctgagg

SEQ ID NO: 472 - DNA, 23 bp, Homo sapiens
  source 1..23: mol_type = genomic DNA
attcatatcactcacagtgaggg

SEQ ID NO: 473 - DNA, 23 bp, Homo sapiens
  source 1..23: mol_type = genomic DNA
attcatatctgtcacagtgaggg

SEQ ID NO: 474 - DNA, 23 bp, Homo sapiens
  source 1..23: mol_type = genomic DNA
attccagcatcatgagtcagggg

SEQ ID NO: 475 - DNA, 23 bp, Homo sapiens
  source 1..23: mol_type = genomic DNA
attccagcattcatgagtcgggg

SEQ ID NO: 476 - DNA, 23 bp, Homo sapiens
  source 1..23: mol_type = genomic DNA
attgtcctagacagcagaggggg

SEQ ID NO: 477 - DNA, 23 bp, Homo sapiens
  source 1..23: mol_type = genomic DNA
atttcgacaccgccacgtcccgg

SEQ ID NO: 478 - DNA, 23 bp, Homo sapiens
  source 1..23: mol_type = genomic DNA
atttcgacaccgccgtgtcctgg

SEQ ID NO: 479 - DNA, 23 bp, Homo sapiens
  source 1..23: mol_type = genomic DNA
atttctacacatccgtgtcccgg

SEQ ID NO: 480 - DNA, 23 bp, Homo sapiens
  source 1..23: mol_type = genomic DNA
atttctacaccgccatgacccgg

SEQ ID NO: 481 - DNA, 23 bp, Homo sapiens
  source 1..23: mol_type = genomic DNA
atttctacaccgccgtgtccggg

SEQ ID NO: 482 - DNA, 23 bp, Homo sapiens
  source 1..23: mol_type = genomic DNA
atttctacaccgctatgtcccgg

SEQ ID NO: 483 - DNA, 23 bp, Homo sapiens
  source 1..23: mol_type = genomic DNA
atttctacatctccgtgtcccgg

SEQ ID NO: 484 - DNA, 23 bp, Homo sapiens
  source 1..23: mol_type = genomic DNA
atttcttcacatccgtgtcctgg

SEQ ID NO: 485 - DNA, 23 bp, Homo sapiens
  source 1..23: mol_type = genomic DNA
atttcttcacattcgtgtcccgg

SEQ ID NO: 486 - DNA, 23 bp, Homo sapiens
  source 1..23: mol_type = genomic DNA
atttctttacatccgtgtcccgg

SEQ ID NO: 487 - DNA, 23 bp, Homo sapiens
  source 1..23: mol_type = genomic DNA
caaaaatccccctggttggtcgg

SEQ ID NO: 488 - DNA, 23 bp, Homo sapiens
  source 1..23: mol_type = genomic DNA
caaacccctcaccctgagatggg

SEQ ID NO: 489 - DNA, 23 bp, Homo sapiens
  source 1..23: mol_type = genomic DNA
caaactggttatgcccgcggagg

SEQ ID NO: 490 - DNA, 23 bp, Homo sapiens
  source 1..23: mol_type = genomic DNA
caaatgggaggcggcccgtgtgg

SEQ ID NO: 491 - DNA, 23 bp, Homo sapiens
  source 1..23: mol_type = genomic DNA
caaatgtcctgtgagggcactgg

SEQ ID NO: 492 - DNA, 23 bp, Homo sapiens
  source 1..23: mol_type = genomic DNA
caacggagagcctacctggaggg

SEQ ID NO: 493 - DNA, 23 bp, Homo sapiens
  source 1..23: mol_type = genomic DNA
caagagcccgcaggagacgtggg

SEQ ID NO: 494 - DNA, 23 bp, Homo sapiens
  source 1..23: mol_type = genomic DNA
caagctcagtgtcctgaatttgg

SEQ ID NO: 495 - DNA, 23 bp, Homo sapiens
  source 1..23: mol_type = genomic DNA
caagctgggtgtcctgagtttgg

SEQ ID NO: 496 - DNA, 23 bp, Homo sapiens
  source 1..23: mol_type = genomic DNA
caaggcacagactgaccgagtgg

SEQ ID NO: 497 - DNA, 23 bp, Homo sapiens
  source 1..23: mol_type = genomic DNA
caagtccgagaggggagccccgg

SEQ ID NO: 498 - DNA, 23 bp, Homo sapiens
  source 1..23: mol_type = genomic DNA
caagtgccatgttcagcacgagg

SEQ ID NO: 499 - DNA, 23 bp, Homo sapiens
  source 1..23: mol_type = genomic DNA
caagtgggaggcagcccgtgagg

SEQ ID NO: 500 - DNA, 23 bp, Homo sapiens
  source 1..23: mol_type = genomic DNA
caagtgggaggcggcccgggtgg

SEQ ID NO: 501 - DNA, 23 bp, Homo sapiens
  source 1..23: mol_type = genomic DNA
caagtgggaggcggcccgtatgg

SEQ ID NO: 502 - DNA, 23 bp, Homo sapiens
  source 1..23: mol_type = genomic DNA
caagtgggaggcggccggtgagg

SEQ ID NO: 503 - DNA, 23 bp, Homo sapiens
  source 1..23: mol_type = genomic DNA
caagtgggaggcggcctgtgagg

SEQ ID NO: 504 - DNA, 23 bp, Homo sapiens
  source 1..23: mol_type = genomic DNA
caagtgggaggcggctcgtgagg

SEQ ID NO: 505 - DNA, 23 bp, Homo sapiens
  source 1..23: mol_type = genomic DNA
caagttggaggcggcccgtgggg

SEQ ID NO: 506 - DNA, 23 bp, Homo sapiens
  source 1..23: mol_type = genomic DNA
cacaagaaagggagacaaatggg

SEQ ID NO: 507 - DNA, 23 bp, Homo sapiens
  source 1..23: mol_type = genomic DNA
cacaatatccaaaggacctcagg

SEQ ID NO: 508 - DNA, 23 bp, Homo sapiens
  source 1..23: mol_type = genomic DNA
cacacacaggccctccaggtagg

SEQ ID NO: 509 - DNA, 23 bp, Homo sapiens
  source 1..23: mol_type = genomic DNA
cacacacgtgccctccaggtagg

SEQ ID NO: 510 - DNA, 23 bp, Homo sapiens
  source 1..23: mol_type = genomic DNA
cacacagatctgcaaggccaagg

SEQ ID NO: 511 - DNA, 23 bp, Homo sapiens
  source 1..23: mol_type = genomic DNA
cacaccatccagaggatgtacgg

SEQ ID NO: 512 - DNA, 23 bp, Homo sapiens
  source 1..23: mol_type = genomic DNA
cacacccgccagaggatgtacgg

SEQ ID NO: 513 - DNA, 23 bp, Homo sapiens
  source 1..23: mol_type = genomic DNA
cacaccctccagacgatgtacgg

SEQ ID NO: 514 - DNA, 23 bp, Homo sapiens
  source 1..23: mol_type = genomic DNA
cacaccctccagagcatgtatgg

SEQ ID NO: 515 - DNA, 23 bp, Homo sapiens
  source 1..23: mol_type = genomic DNA
cacaccctccagagcttgtacgg

SEQ ID NO: 516 - DNA, 23 bp, Homo sapiens
  source 1..23: mol_type = genomic DNA
cacaccctccagatgatgtatgg

SEQ ID NO: 517 - DNA, 23 bp, Homo sapiens
  source 1..23: mol_type = genomic DNA
cacaccctccagcggatgtatgg

SEQ ID NO: 518 - DNA, 23 bp, Homo sapiens
  source 1..23: mol_type = genomic DNA
cacaccgtccagaggatgtttgg

SEQ ID NO: 519 - DNA, 23 bp, Homo sapiens
  source 1..23: mol_type = genomic DNA
cacacctccgtgtcccggcctgg

SEQ ID NO: 520 - DNA, 23 bp, Homo sapiens
  source 1..23: mol_type = genomic DNA
cacacgggccgcctcccacttgg

SEQ ID NO: 521 - DNA, 23 bp, Homo sapiens
  source 1..23: mol_type = genomic DNA
cacactctccagagcatgtacgg

SEQ ID NO: 522 - DNA, 23 bp, Homo sapiens
  source 1..23: mol_type = genomic DNA
cacactgaccgagtggacctggg

SEQ ID NO: 523 - DNA, 23 bp, Homo sapiens
  source 1..23: mol_type = genomic DNA
cacacttggcagacgatgtacgg

SEQ ID NO: 524 - DNA, 23 bp, Homo sapiens
  source 1..23: mol_type = genomic DNA
cacagcatccagaggatgtatgg

SEQ ID NO: 525 - DNA, 23 bp, Homo sapiens
  source 1..23: mol_type = genomic DNA
cacagcctcccacttctggaagg

SEQ ID NO: 526 - DNA, 23 bp, Homo sapiens
  source 1..23: mol_type = genomic DNA
cacaggtaccaggggccacgggg

SEQ ID NO: 527 - DNA, 23 bp, Homo sapiens
  source 1..23: mol_type = genomic DNA
cacatcatccagaggatgtaagg

SEQ ID NO: 528 - DNA, 23 bp, Homo sapiens
  source 1..23: mol_type = genomic DNA
cacatcatccggaggatgtatgg

SEQ ID NO: 529 - DNA, 23 bp, Homo sapiens
  source 1..23: mol_type = genomic DNA
cacatgccaggtacagcatgagg

SEQ ID NO: 530 - DNA, 23 bp, Homo sapiens
  source 1..23: mol_type = genomic DNA
caccagcggacgcaggcacctgg

SEQ ID NO: 531 - DNA, 23 bp, Homo sapiens
  source 1..23: mol_type = genomic DNA
cacccaataggagtgagaactgg

SEQ ID NO: 532 - DNA, 23 bp, Homo sapiens
  source 1..23: mol_type = genomic DNA
cacccaattggagtgagaactgg

SEQ ID NO: 533 - DNA, 23 bp, Homo sapiens
  source 1..23: mol_type = genomic DNA
cacccagcacaagttggaggcgg

SEQ ID NO: 534 - DNA, 23 bp, Homo sapiens
  source 1..23: mol_type = genomic DNA
cacccagcccaagtgggaggcgg

SEQ ID NO: 535 - DNA, 23 bp, Homo sapiens
  source 1..23: mol_type = genomic DNA
cacccagcccaagttggaggcgg

SEQ ID NO: 536 - DNA, 23 bp, Homo sapiens
  source 1..23: mol_type = genomic DNA
cacccagcgcaaatgggaggcgg

SEQ ID NO: 537 - DNA, 23 bp, Homo sapiens
  source 1..23: mol_type = genomic DNA
cacccagcgtaagtgggaggcgg

SEQ ID NO: 538 - DNA, 23 bp, Homo sapiens
  source 1..23: mol_type = genomic DNA
cacccgatgggagtgagaactgg

SEQ ID NO: 539 - DNA, 23 bp, Homo sapiens
  source 1..23: mol_type = genomic DNA
cacccgcccaggtctcggtcagg

SEQ ID NO: 540 - DNA, 23 bp, Homo sapiens
  source 1..23: mol_type = genomic DNA
caccctgagatgggataaggagg

SEQ ID NO: 541 - DNA, 23 bp, Homo sapiens
  source 1..23: mol_type = genomic DNA
caccctgagatgggttaaggagg

SEQ ID NO: 542 - DNA, 23 bp, Homo sapiens
  source 1..23: mol_type = genomic DNA
caccctgaggtgctgggccatgg

SEQ ID NO: 543 - DNA, 23 bp, Homo sapiens
  source 1..23: mol_type = genomic DNA
caccgagcgcaagtgggaggcgg

SEQ ID NO: 544 - DNA, 23 bp, Homo sapiens
  source 1..23: mol_type = genomic DNA
caccgcagatacctgtggagtgg

SEQ ID NO: 545 - DNA, 23 bp, Homo sapiens
  source 1..23: mol_type = genomic DNA
caccggccggggtcactcaccgg

SEQ ID NO: 546 - DNA, 23 bp, Homo sapiens
  source 1..23: mol_type = genomic DNA
caccgtagctgtggtcgctgtgg

SEQ ID NO: 547 - DNA, 23 bp, Homo sapiens
  source 1..23: mol_type = genomic DNA
caccgtggatagagcaggagagg

SEQ ID NO: 548 - DNA, 23 bp, Homo sapiens
  source 1..23: mol_type = genomic DNA
caccgtggtggttgtggtgttgg

SEQ ID NO: 549 - DNA, 23 bp, Homo sapiens
  source 1..23: mol_type = genomic DNA
cacctcatggagtgggagcctgg

SEQ ID NO: 550 - DNA, 23 bp, Homo sapiens
  source 1..23: mol_type = genomic DNA
cacctcccggcgcggctccccgg

SEQ ID NO: 551 - DNA, 23 bp, Homo sapiens
  source 1..23: mol_type = genomic DNA
cacctccctgcgccgctccccgg

SEQ ID NO: 552 - DNA, 23 bp, Homo sapiens
  source 1..23: mol_type = genomic DNA
caccttaatggttgtggtgttgg

SEQ ID NO: 553 - DNA, 23 bp, Homo sapiens
  source 1..23: mol_type = genomic DNA
caccttgatattatggtgttggg

SEQ ID NO: 554 - DNA, 23 bp, Homo sapiens
  source 1..23: mol_type = genomic DNA
caccttggtggttgtggcgttgg

SEQ ID NO: 555 - DNA, 23 bp, Homo sapiens
  source 1..23: mol_type = genomic DNA
cacgaacgtgccctccaggtagg

SEQ ID NO: 556 - DNA, 23 bp, Homo sapiens
  source 1..23: mol_type = genomic DNA
cacgaggaagggaggaaaatggg

SEQ ID NO: 557 - DNA, 23 bp, Homo sapiens
  source 1..23: mol_type = genomic DNA
cacgagtaccaggggccacgggg

SEQ ID NO: 558 - DNA, 23 bp, Homo sapiens
  source 1..23: mol_type = genomic DNA
cacgatggggacagtggactggg

SEQ ID NO: 559 - DNA, 23 bp, Homo sapiens
  source 1..23: mol_type = genomic DNA
cacgcacagaccctccaggtagg

SEQ ID NO: 560 - DNA, 23 bp, Homo sapiens
  source 1..23: mol_type = genomic DNA
cacgcacaggccctcccggtagg

SEQ ID NO: 561 - DNA, 23 bp, Homo sapiens
  source 1..23: mol_type = genomic DNA
cacgcacgtgcccaccaggtagg

SEQ ID NO: 562 - DNA, 23 bp, Homo sapiens
  source 1..23: mol_type = genomic DNA
cacgcacgtgccctccaggtggg

SEQ ID NO: 563 - DNA, 23 bp, Homo sapiens
  source 1..23: mol_type = genomic DNA
cacgcacgtgtcctccaggtagg

SEQ ID NO: 564 - DNA, 23 bp, Homo sapiens
  source 1..23: mol_type = genomic DNA
cacgcacgttccctccaggtagg

SEQ ID NO: 565 - DNA, 23 bp, Homo sapiens
  source 1..23: mol_type = genomic DNA
cacgcactcgccctccaggcagg

SEQ ID NO: 566 - DNA, 23 bp, Homo sapiens
  source 1..23: mol_type = genomic DNA
cacgcacttgccctccaggtagg

SEQ ID NO: 567 - DNA, 23 bp, Homo sapiens
  source 1..23: mol_type = genomic DNA
cacgcgcgtgccctccaggtagg

SEQ ID NO: 568 - DNA, 23 bp, Homo sapiens
  source 1..23: mol_type = genomic DNA
cacgcgggtaccaggggcagtgg

SEQ ID NO: 569 - DNA, 23 bp, Homo sapiens
  source 1..23: mol_type = genomic DNA
cacggacctggcagcgggatggg

SEQ ID NO: 570 - DNA, 23 bp, Homo sapiens
  source 1..23: mol_type = genomic DNA
cacgggtaccagggaccacgggg

SEQ ID NO: 571 - DNA, 23 bp, Homo sapiens
  source 1..23: mol_type = genomic DNA
cacgtacgtgccctccaggtagg

SEQ ID NO: 572 - DNA, 23 bp, Homo sapiens
  source 1..23: mol_type = genomic DNA
cacgtcccggcccggccgcgggg

SEQ ID NO: 573 - DNA, 23 bp, Homo sapiens
  source 1..23: mol_type = genomic DNA
cacgtgccatgtgcagcatgagg

SEQ ID NO: 574 - DNA, 23 bp, Homo sapiens
  source 1..23: mol_type = genomic DNA
cactcacgtgccctccaggtagg

SEQ ID NO: 575 - DNA, 23 bp, Homo sapiens
  source 1..23: mol_type = genomic DNA
cactcagcgcaagttggaggcgg

SEQ ID NO: 576 - DNA, 23 bp, Homo sapiens
  source 1..23: mol_type = genomic DNA
cactcggtcagtctgtgcctggg

SEQ ID NO: 577 - DNA, 23 bp, Homo sapiens
  source 1..23: mol_type = genomic DNA
cactcggtcagtctgtgccttgg

SEQ ID NO: 578 - DNA, 23 bp, Homo sapiens
  source 1..23: mol_type = genomic DNA
cactcggtcagtgtgtgactggg

SEQ ID NO: 579 - DNA, 23 bp, Homo sapiens
  source 1..23: mol_type = genomic DNA
cactctgaggtgctgggccctgg

SEQ ID NO: 580 - DNA, 23 bp, Homo sapiens
  source 1..23: mol_type = genomic DNA
cactgacctgacagcgggatggg

SEQ ID NO: 581 - DNA, 23 bp, Homo sapiens
  source 1..23: mol_type = genomic DNA
cactgacctggcagcgggatagg

SEQ ID NO: 582 - DNA, 23 bp, Homo sapiens
  source 1..23: mol_type = genomic DNA
cactgatctggcagtgggatggg

SEQ ID NO: 583 - DNA, 23 bp, Homo sapiens
  source 1..23: mol_type = genomic DNA
cactggtaccaggggccacgggg

SEQ ID NO: 584 - DNA, 23 bp, Homo sapiens
  source 1..23: mol_type = genomic DNA
cacttcttctcccaacttgtggg

SEQ ID NO: 585 - DNA, 23 bp, Homo sapiens
  source 1..23: mol_type = genomic DNA
cagacacctgaagaatgggaagg

SEQ ID NO: 586 - DNA, 23 bp, Homo sapiens
  source 1..23: mol_type = genomic DNA
cagacacctggagaacaggaagg

SEQ ID NO: 587 - DNA, 23 bp, Homo sapiens
  source 1..23: mol_type = genomic DNA
cagactgaccgagagaactgcgg

SEQ ID NO: 588 - DNA, 23 bp, Homo sapiens
  source 1..23: mol_type = genomic DNA
cagagcgaggacggtgaccccgg

SEQ ID NO: 589 - DNA, 23 bp, Homo sapiens
  source 1..23: mol_type = genomic DNA
cagatacctgaagaaagggaagg

SEQ ID NO: 590 - DNA, 23 bp, Homo sapiens
  source 1..23: mol_type = genomic DNA
cagatacctggagaaagggaagg

SEQ ID NO: 591 - DNA, 23 bp, Homo sapiens
  source 1..23: mol_type = genomic DNA
cagatacctggagaaccggaagg

SEQ ID NO: 592 - DNA, 23 bp, Homo sapiens
  source 1..23: mol_type = genomic DNA
cagatacctggagaacggtaagg

SEQ ID NO: 593 - DNA, 23 bp, Homo sapiens
  source 1..23: mol_type = genomic DNA
cagatacctggagaatgggaagg

SEQ ID NO: 594 - DNA, 23 bp, Homo sapiens
  source 1..23: mol_type = genomic DNA
cagatatctggagaacgggaagg

SEQ ID NO: 595 - DNA, 23 bp, Homo sapiens
  source 1..23: mol_type = genomic DNA
cagatcagtgtgatctccgcagg

SEQ ID NO: 596 - DNA, 23 bp, Homo sapiens
  source 1..23: mol_type = genomic DNA
cagcatcatgagtcaggggaagg

SEQ ID NO: 597 - DNA, 23 bp, Homo sapiens
  source 1..23: mol_type = genomic DNA
cagcatgaggggcttcggtaagg

SEQ ID NO: 598 - DNA, 23 bp, Homo sapiens
  source 1..23: mol_type = genomic DNA
cagcccggacgcaggcacctggg

SEQ ID NO: 599 - DNA, 23 bp, Homo sapiens
  source 1..23: mol_type = genomic DNA
cagcctggacacagacacctggg

SEQ ID NO: 600 - DNA, 23 bp, Homo sapiens
  source 1..23: mol_type = genomic DNA
cagcgacgccgcgagtccgaggg

SEQ ID NO: 601 - DNA, 23 bp, Homo sapiens
  source 1..23: mol_type = genomic DNA
cagcgcaagtgggaggcggccgg

SEQ ID NO: 602 - DNA, 23 bp, Homo sapiens
  source 1..23: mol_type = genomic DNA
cagcggagaacctacctggaggg

SEQ ID NO: 603 - DNA, 23 bp, Homo sapiens
  source 1..23: mol_type = genomic DNA
cagctaagagcctacctggaggg

SEQ ID NO: 604 - DNA, 23 bp, Homo sapiens
  source 1..23: mol_type = genomic DNA
cagctgagagcctaccgggaggg

SEQ ID NO: 605 - DNA, 23 bp, Homo sapiens
  source 1..23: mol_type = genomic DNA
cagctgagagcctacctggatgg

SEQ ID NO: 606 - DNA, 23 bp, Homo sapiens
  source 1..23: mol_type = genomic DNA
cagctgagagcctacctggtggg

SEQ ID NO: 607 - DNA, 23 bp, Homo sapiens
  source 1..23: mol_type = genomic DNA
cagctgagagcctgcctggaggg

SEQ ID NO: 608 - DNA, 23 bp, Homo sapiens
  source 1..23: mol_type = genomic DNA
caggacccgggaagccgcgcagg

SEQ ID NO: 609 - DNA, 23 bp, Homo sapiens
  source 1..23: mol_type = genomic DNA
caggccgggacacggaggtgtgg

SEQ ID NO: 610 - DNA, 23 bp, Homo sapiens
  source 1..23: mol_type = genomic DNA
caggcctcatcccccacggacgg

SEQ ID NO: 611 - DNA, 23 bp, Homo sapiens
  source 1..23: mol_type = genomic DNA
cagggggcggatctcggacccgg

SEQ ID NO: 612 - DNA, 23 bp, Homo sapiens
  source 1..23: mol_type = genomic DNA
caggggggtggtggggcagaggg

SEQ ID NO: 613 - DNA, 23 bp, Homo sapiens
  source 1..23: mol_type = genomic DNA
cagggtctcacacccgccagagg

SEQ ID NO: 614 - DNA, 23 bp, Homo sapiens
  source 1..23: mol_type = genomic DNA
cagggtctcacaccctccagcgg

SEQ ID NO: 615 - DNA, 23 bp, Homo sapiens
  source 1..23: mol_type = genomic DNA
cagggtctcacaccgtccagagg

SEQ ID NO: 616 - DNA, 23 bp, Homo sapiens
  source 1..23: mol_type = genomic DNA
cagggtctcacatcatccggagg

SEQ ID NO: 617 - DNA, 23 bp, Homo sapiens
  source 1..23: mol_type = genomic DNA
cagggtctcataccctccagagg

SEQ ID NO: 618 - DNA, 23 bp, Homo sapiens
  source 1..23: mol_type = genomic DNA
cagggtttttcaagtcacaaagg

SEQ ID NO: 619 - DNA, 23 bp, Homo sapiens
  source 1..23: mol_type = genomic DNA
caggtaggctctcagctgctcgg

SEQ ID NO: 620 - DNA, 23 bp, Homo sapiens
  source 1..23: mol_type = genomic DNA
caggtccgtgtgatctccgcagg

SEQ ID NO: 621 - DNA, 23 bp, Homo sapiens
  source 1..23: mol_type = genomic DNA
caggttctcacagcatccagagg

SEQ ID NO: 622 - DNA, 23 bp, Homo sapiens
  source 1..23: mol_type = genomic DNA
cagtccactgtccccatcgtggg

SEQ ID NO: 623 - DNA, 23 bp, Homo sapiens
  source 1..23: mol_type = genomic DNA
cagtccctataatactgatcagg

SEQ ID NO: 624 - DNA, 23 bp, Homo sapiens
  source 1..23: mol_type = genomic DNA
cagtgcagagcctacctggaggg

SEQ ID NO: 625 - DNA, 23 bp, Homo sapiens
  source 1..23: mol_type = genomic DNA
cagtggacacaagggtgggctgg

SEQ ID NO: 626 - DNA, 23 bp, Homo sapiens
  source 1..23: mol_type = genomic DNA
cagtggagagcccacctggaggg

SEQ ID NO: 627 - DNA, 23 bp, Homo sapiens
  source 1..23: mol_type = genomic DNA
cagtggagagtctacctggaggg

SEQ ID NO: 628 - DNA, 23 bp, Homo sapiens
  source 1..23: mol_type = genomic DNA
cagtggtcgaagtggtcaaaggg

SEQ ID NO: 629 - DNA, 23 bp, Homo sapiens
  source 1..23: mol_type = genomic DNA
cagttcgcctacgacggcaaggg

SEQ ID NO: 630 - DNA, 23 bp, Homo sapiens
  source 1..23: mol_type = genomic DNA
cagttgaaagcctacctggaggg

SEQ ID NO: 631 - DNA, 23 bp, Homo sapiens
  source 1..23: mol_type = genomic DNA
cataaccaggacgcctacgacgg

SEQ ID NO: 632 - DNA, 23 bp, Homo sapiens
  source 1..23: mol_type = genomic DNA
cataaccagtactcctacgacgg

SEQ ID NO: 633 - DNA, 23 bp, Homo sapiens
  source 1..23: mol_type = genomic DNA
cataaccagtttgcctacgacgg

SEQ ID NO: 634 - DNA, 23 bp, Homo sapiens
  source 1..23: mol_type = genomic DNA
catacccgcggaggaggcgccgg

SEQ ID NO: 635 - DNA, 23 bp, Homo sapiens
  source 1..23: mol_type = genomic DNA
cataccctccagaggatgtacgg

SEQ ID NO: 636 - DNA, 23 bp, Homo sapiens
  source 1..23: mol_type = genomic DNA
catactgctcatacccgcggagg

SEQ ID NO: 637 - DNA, 23 bp, Homo sapiens
  source 1..23: mol_type = genomic DNA
catagcccacggtgatgaagcgg

SEQ ID NO: 638 - DNA, 23 bp, Homo sapiens
  source 1..23: mol_type = genomic DNA
catccagcgcaagtgggaggcgg

SEQ ID NO: 639 - DNA, 23 bp, Homo sapiens
  source 1..23: mol_type = genomic DNA
catcgggagaatctgagtcccgg

SEQ ID NO: 640 - DNA, 23 bp, Homo sapiens
  source 1..23: mol_type = genomic DNA
catgaccagtccgcctaggacgg

SEQ ID NO: 641 - DNA, 23 bp, Homo sapiens
  source 1..23: mol_type = genomic DNA
catgaccagtccgcctgcgacgg

SEQ ID NO: 642 - DNA, 23 bp, Homo sapiens
  source 1..23: mol_type = genomic DNA
catgacccggcccggccgcgggg

SEQ ID NO: 643 - DNA, 23 bp, Homo sapiens
  source 1..23: mol_type = genomic DNA
catgaggggcttcggtaaggagg

SEQ ID NO: 644 - DNA, 23 bp, Homo sapiens
  source 1..23: mol_type = genomic DNA
catgcacgtgccctccaggtagg

SEQ ID NO: 645 - DNA, 23 bp, Homo sapiens
  source 1..23: mol_type = genomic DNA
catgccaggtacagcatgagggg

SEQ ID NO: 646 - DNA, 23 bp, Homo sapiens
  source 1..23: mol_type = genomic DNA
catggcccagcacctcagggtgg

SEQ ID NO: 647 - DNA, 23 bp, Homo sapiens
  source 1..23: mol_type = genomic DNA
catgtcccggcccggccgtgggg

SEQ ID NO: 648 - DNA, 23 bp, Homo sapiens
  source 1..23: mol_type = genomic DNA
catgtcccggcccggctgcgggg

SEQ ID NO: 649 - DNA, 23 bp, Homo sapiens
  source 1..23: mol_type = genomic DNA
catgtttcctgatcccgcctggg

SEQ ID NO: 650 - DNA, 23 bp, Homo sapiens
  source 1..23: mol_type = genomic DNA
cattactggaaacttctctgagg

SEQ ID NO: 651 - DNA, 23 bp, Homo sapiens
  source 1..23: mol_type = genomic DNA
catttgtctccctttcttgtggg

SEQ ID NO: 652 - DNA, 23 bp, Homo sapiens
  source 1..23: mol_type = genomic DNA
cattttcctcccttcctcgtggg

SEQ ID NO: 653 - DNA, 23 bp, Homo sapiens
  source 1..23: mol_type = genomic DNA
ccaaacaccagcctggacgcagg

SEQ ID NO: 654 - DNA, 23 bp, Homo sapiens
  source 1..23: mol_type = genomic DNA
ccaaacccctcaccctgagatgg

SEQ ID NO: 655 - DNA, 23 bp, Homo sapiens
  source 1..23: mol_type = genomic DNA
ccaaccccgacgtacggcccggg

SEQ ID NO: 656 - DNA, 23 bp, Homo sapiens
  source 1..23: mol_type = genomic DNA
ccaatgggagtgggaattggggg

SEQ ID NO: 657 - DNA, 23 bp, Homo sapiens
  source 1..23: mol_type = genomic DNA
ccacaagaaagggagacaaatgg

SEQ ID NO: 658 - DNA, 23 bp, Homo sapiens
  source 1..23: mol_type = genomic DNA
ccacagctacggtgaccacaagg

SEQ ID NO: 659 - DNA, 23 bp, Homo sapiens
  source 1..23: mol_type = genomic DNA
ccaccacagcctcccacttctgg

SEQ ID NO: 660 - DNA, 23 bp, Homo sapiens
  source 1..23: mol_type = genomic DNA
ccacctggagggcacgtgcgtgg

SEQ ID NO: 661 - DNA, 23 bp, Homo sapiens
  source 1..23: mol_type = genomic DNA
ccacgaggaagggaggaaaatgg

SEQ ID NO: 662 - DNA, 23 bp, Homo sapiens
  source 1..23: mol_type = genomic DNA
ccacgatggggacagtggactgg

SEQ ID NO: 663 - DNA, 23 bp, Homo sapiens
  source 1..23: mol_type = genomic DNA
ccacgcacgtgccctccaggtgg

SEQ ID NO: 664 - DNA, 23 bp, Homo sapiens
  source 1..23: mol_type = genomic DNA
ccacgccgcgagtccgaggacgg

SEQ ID NO: 665 - DNA, 23 bp, Homo sapiens
  source 1..23: mol_type = genomic DNA
ccacggaggaggcgcccgtccgg

SEQ ID NO: 666 - DNA, 23 bp, Homo sapiens
  source 1..23: mol_type = genomic DNA
ccacgtcccggcccggccgcggg

SEQ ID NO: 667 - DNA, 23 bp, Homo sapiens
  source 1..23: mol_type = genomic DNA
ccactacgcctacgacggcaagg

SEQ ID NO: 668 - DNA, 23 bp, Homo sapiens
  source 1..23: mol_type = genomic DNA
ccactcggtcagtgtgtgactgg

SEQ ID NO: 669 - DNA, 23 bp, Homo sapiens
  source 1..23: mol_type = genomic DNA
ccactgccccctagagcagcagg

SEQ ID NO: 670 - DNA, 23 bp, Homo sapiens
  source 1..23: mol_type = genomic DNA
ccactgctccgcctcatgggcgg

SEQ ID NO: 671 - DNA, 23 bp, Homo sapiens
  source 1..23: mol_type = genomic DNA
ccactggggtttcaagccccagg

SEQ ID NO: 672 - DNA, 23 bp, Homo sapiens
  source 1..23: mol_type = genomic DNA
ccagaagtgggaggctgtggtgg

SEQ ID NO: 673 - DNA, 23 bp, Homo sapiens
  source 1..23: mol_type = genomic DNA
ccagacaccagcccggacgcagg

SEQ ID NO: 674 - DNA, 23 bp, Homo sapiens
  source 1..23: mol_type = genomic DNA
ccagcccggacgcaggcacctgg

SEQ ID NO: 675 - DNA, 23 bp, Homo sapiens
  source 1..23: mol_type = genomic DNA
ccagccgtacatcctctggaggg

SEQ ID NO: 676 - DNA, 23 bp, Homo sapiens
  source 1..23: mol_type = genomic DNA
ccagcctggacacagacacctgg

SEQ ID NO: 677 - DNA, 23 bp, Homo sapiens
  source 1..23: mol_type = genomic DNA
ccaggacacggagctcgtggagg

SEQ ID NO: 678 - DNA, 23 bp, Homo sapiens
  source 1..23: mol_type = genomic DNA
ccaggagacgcggaatgtgaagg

SEQ ID NO: 679 - DNA, 23 bp, Homo sapiens
  source 1..23: mol_type = genomic DNA
ccaggcacagactgaccgagagg

SEQ ID NO: 680 - DNA, 23 bp, Homo sapiens
  source 1..23: mol_type = genomic DNA
ccaggtgcctgcgtccgggctgg

SEQ ID NO: 681 - DNA, 23 bp, Homo sapiens
  source 1..23: mol_type = genomic DNA
ccaggtgtctgtgtccaggctgg

SEQ ID NO: 682 - DNA, 23 bp, Homo sapiens
  source 1..23: mol_type = genomic DNA
ccagtacgcctacgacggcaggg

SEQ ID NO: 683 - DNA, 23 bp, Homo sapiens
  source 1..23: mol_type = genomic DNA
ccagtactcctacgacggcaagg

SEQ ID NO: 684 - DNA, 23 bp, Homo sapiens
  source 1..23: mol_type = genomic DNA
ccagtcacacactgaccgagtgg

SEQ ID NO: 685 - DNA, 23 bp, Homo sapiens
  source 1..23: mol_type = genomic DNA
ccagtccactgtccccatcgtgg

SEQ ID NO: 686 - DNA, 23 bp, Homo sapiens
  source 1..23: mol_type = genomic DNA
ccagtccgcctaagacggcaagg

SEQ ID NO: 687 - DNA, 23 bp, Homo sapiens
  source 1..23: mol_type = genomic DNA
ccagtccgcctaggacggcaagg

SEQ ID NO: 688 - DNA, 23 bp, Homo sapiens
  source 1..23: mol_type = genomic DNA
ccagtccgcctgcgacggcaagg

SEQ ID NO: 689 - DNA, 23 bp, Homo sapiens
  source 1..23: mol_type = genomic DNA
ccagttcgcctacgatggcaagg

SEQ ID NO: 690 - DNA, 23 bp, Homo sapiens
  source 1..23: mol_type = genomic DNA
ccagtttgcctacgacggcaagg

SEQ ID NO: 691 - DNA, 23 bp, Homo sapiens
  source 1..23: mol_type = genomic DNA
ccatcccccacgtacggccgggg

SEQ ID NO: 692 - DNA, 23 bp, Homo sapiens
  source 1..23: mol_type = genomic DNA
ccatctcagggtgaggggtttgg

SEQ ID NO: 693 - DNA, 23 bp, Homo sapiens
  source 1..23: mol_type = genomic DNA
ccatctcctatagatcgcccggg

SEQ ID NO: 694 - DNA, 23 bp, Homo sapiens
  source 1..23: mol_type = genomic DNA
ccatgacccggcccggccgcggg

SEQ ID NO: 695 - DNA, 23 bp, Homo sapiens
  source 1..23: mol_type = genomic DNA
ccatgtcccggcccggccgtggg

SEQ ID NO: 696 - DNA, 23 bp, Homo sapiens
  source 1..23: mol_type = genomic DNA
ccatgtcccggcccggctgcggg

SEQ ID NO: 697 - DNA, 23 bp, Homo sapiens
  source 1..23: mol_type = genomic DNA
ccatttgtctccctttcttgtgg

SEQ ID NO: 698 - DNA, 23 bp, Homo sapiens
  source 1..23: mol_type = genomic DNA
ccattttcctcccttcctcgtgg

SEQ ID NO: 699 - DNA, 23 bp, Homo sapiens
  source 1..23: mol_type = genomic DNA
cccaaccccgacgtacggcccgg

SEQ ID NO: 700 - DNA, 23 bp, Homo sapiens
  source 1..23: mol_type = genomic DNA
cccacggccgggccgggacatgg

SEQ ID NO: 701 - DNA, 23 bp, Homo sapiens
  source 1..23: mol_type = genomic DNA
cccagccgtacatcctctggagg

SEQ ID NO: 702 - DNA, 23 bp, Homo sapiens
  source 1..23: mol_type = genomic DNA
cccatcccccacgtacggccggg

SEQ ID NO: 703 - DNA, 23 bp, Homo sapiens
  source 1..23: mol_type = genomic DNA
cccatctcctatagatcgcccgg

SEQ ID NO: 704 - DNA, 23 bp, Homo sapiens
  source 1..23: mol_type = genomic DNA
cccattttccattcaagggaggg

SEQ ID NO: 705 - DNA, 23 bp, Homo sapiens
  source 1..23: mol_type = genomic DNA
ccccaacaccacaaccaccacgg

SEQ ID NO: 706 - DNA, 23 bp, Homo sapiens
  source 1..23: mol_type = genomic DNA
ccccaacaccacaaccattaagg

SEQ ID NO: 707 - DNA, 23 bp, Homo sapiens
  source 1..23: mol_type = genomic DNA
ccccaacgccacaaccaccaagg

SEQ ID NO: 708 - DNA, 23 bp, Homo sapiens
  source 1..23: mol_type = genomic DNA
ccccaggctcccactccttgagg

SEQ ID NO: 709 - DNA, 23 bp, Homo sapiens
  source 1..23: mol_type = genomic DNA
ccccaggctcccacttcatgagg

SEQ ID NO: 710 - DNA, 23 bp, Homo sapiens
  source 1..23: mol_type = genomic DNA
ccccaggctccctctccatgagg

SEQ ID NO: 711 - DNA, 23 bp, Homo sapiens
  source 1..23: mol_type = genomic DNA
ccccaggctcctactccatgagg

SEQ ID NO: 712 - DNA, 23 bp, Homo sapiens
  source 1..23: mol_type = genomic DNA
ccccaggcttccactccatgagg

SEQ ID NO: 713 - DNA, 23 bp, Homo sapiens
  source 1..23: mol_type = genomic DNA
ccccaggttcccactccatgagg

SEQ ID NO: 714 - DNA, 23 bp, Homo sapiens
  source 1..23: mol_type = genomic DNA
ccccatcccccacgtacggccgg

SEQ ID NO: 715 - DNA, 23 bp, Homo sapiens
  source 1..23: mol_type = genomic DNA
cccccaattcccactcccattgg

SEQ ID NO: 716 - DNA, 23 bp, Homo sapiens
  source 1..23: mol_type = genomic DNA
ccccctagagcagcaggaggagg

SEQ ID NO: 717 - DNA, 23 bp, Homo sapiens
  source 1..23: mol_type = genomic DNA
ccccctggttggtcggggccggg

SEQ ID NO: 718 - DNA, 23 bp, Homo sapiens
  source 1..23: mol_type = genomic DNA
ccccggccgtacgtgggggatgg

SEQ ID NO: 719 - DNA, 23 bp, Homo sapiens
  source 1..23: mol_type = genomic DNA
ccccggcggtccaggagcgcagg

SEQ ID NO: 720 - DNA, 23 bp, Homo sapiens
  source 1..23: mol_type = genomic DNA
ccccgggccggggtcactcacgg

SEQ ID NO: 721 - DNA, 23 bp, Homo sapiens
  source 1..23: mol_type = genomic DNA
cccctagagcagcaggaggaggg

SEQ ID NO: 722 - DNA, 23 bp, Homo sapiens
  source 1..23: mol_type = genomic DNA
cccctccctcctctccgcagagg

SEQ ID NO: 723 - DNA, 23 bp, Homo sapiens
  source 1..23: mol_type = genomic DNA
cccctcgctcctctcagcagagg

SEQ ID NO: 724 - DNA, 23 bp, Homo sapiens
  source 1..23: mol_type = genomic DNA
cccctcgctcctctccatagagg

SEQ ID NO: 725 - DNA, 23 bp, Homo sapiens
  source 1..23: mol_type = genomic DNA
cccgaccggcgcctcctccgcgg

SEQ ID NO: 726 - DNA, 23 bp, Homo sapiens
  source 1..23: mol_type = genomic DNA
cccgacgggcccctcctccgcgg

SEQ ID NO: 727 - DNA, 23 bp, Homo sapiens
  source 1..23: mol_type = genomic DNA
cccgacgggcgcctcctccacgg

SEQ ID NO: 728 - DNA, 23 bp, Homo sapiens
  source 1..23: mol_type = genomic DNA
cccgacgggcgtctcctccgcgg

SEQ ID NO: 729 - DNA, 23 bp, Homo sapiens
  source 1..23: mol_type = genomic DNA
cccgcagccgggccgggacatgg

SEQ ID NO: 730 - DNA, 23 bp, Homo sapiens
  source 1..23: mol_type = genomic DNA
cccgcggaggagacgcccgtcgg

SEQ ID NO: 731 - DNA, 23 bp, Homo sapiens
  source 1..23: mol_type = genomic DNA
cccgcggaggaggcgcccgccgg

SEQ ID NO: 732 - DNA, 23 bp, Homo sapiens
  source 1..23: mol_type = genomic DNA
cccgcggaggaggcgcccgtagg

SEQ ID NO: 733 - DNA, 23 bp, Homo sapiens
  source 1..23: mol_type = genomic DNA
cccgcggaggaggcgccggtcgg

SEQ ID NO: 734 - DNA, 23 bp, Homo sapiens
  source 1..23: mol_type = genomic DNA
cccgcggaggaggggcccgtcgg

SEQ ID NO: 735 - DNA, 23 bp, Homo sapiens
  source 1..23: mol_type = genomic DNA
cccgcggccaggccgggacacgg

SEQ ID NO: 736 - DNA, 23 bp, Homo sapiens
  source 1..23: mol_type = genomic DNA
cccgcggccgggccgggacgtgg

SEQ ID NO: 737 - DNA, 23 bp, Homo sapiens
  source 1..23: mol_type = genomic DNA
cccgcggccgggccgggtcatgg

SEQ ID NO: 738 - DNA, 23 bp, Homo sapiens
  source 1..23: mol_type = genomic DNA
cccgctgccgggccgggacacgg

SEQ ID NO: 739 - DNA, 23 bp, Homo sapiens
  source 1..23: mol_type = genomic DNA
cccggccccgaccaaccaggggg

SEQ ID NO: 740 - DNA, 23 bp, Homo sapiens
  source 1..23: mol_type = genomic DNA
cccggccggtggcgcaggtcagg

SEQ ID NO: 741 - DNA, 23 bp, Homo sapiens
  source 1..23: mol_type = genomic DNA
cccggccgtacgtgggggatggg

SEQ ID NO: 742 - DNA, 23 bp, Homo sapiens
  source 1..23: mol_type = genomic DNA
cccggcgggcgcctcctccgcgg

SEQ ID NO: 743 - DNA, 23 bp, Homo sapiens
  source 1..23: mol_type = genomic DNA
cccgggccgtacgtcggggttgg

SEQ ID NO: 744 - DNA, 23 bp, Homo sapiens
  source 1..23: mol_type = genomic DNA
cccgggcgatctataggagatgg

SEQ ID NO: 745 - DNA, 23 bp, Homo sapiens
  source 1..23: mol_type = genomic DNA
cccgggtcgccccgagtctcagg

SEQ ID NO: 746 - DNA, 23 bp, Homo sapiens
  source 1..23: mol_type = genomic DNA
cccggtcccaatactccgtccgg

SEQ ID NO: 747 - DNA, 23 bp, Homo sapiens
  source 1..23: mol_type = genomic DNA
cccggtttcgttttcagtttagg

SEQ ID NO: 748 - DNA, 23 bp, Homo sapiens
  source 1..23: mol_type = genomic DNA
cccgtggaggaggcgcccgtcgg

SEQ ID NO: 749 - DNA, 23 bp, Homo sapiens
  source 1..23: mol_type = genomic DNA
ccctacgggcgcctcctccgcgg

SEQ ID NO: 750 - DNA, 23 bp, Homo sapiens
  source 1..23: mol_type = genomic DNA
ccctccagaggatgtacggctgg

SEQ ID NO: 751 - DNA, 23 bp, Homo sapiens
  source 1..23: mol_type = genomic DNA
ccctccccaaccccgacgtacgg

SEQ ID NO: 752 - DNA, 23 bp, Homo sapiens
  source 1..23: mol_type = genomic DNA
ccctcccttgaatggaaaatggg

SEQ ID NO: 753 - DNA, 23 bp, Homo sapiens
  source 1..23: mol_type = genomic DNA
ccctcctcctgctgctctagggg

SEQ ID NO: 754 - DNA, 23 bp, Homo sapiens
  source 1..23: mol_type = genomic DNA
ccctcctgaggtctgtcgtcagg

SEQ ID NO: 755 - DNA, 23 bp, Homo sapiens
  source 1..23: mol_type = genomic DNA
ccctgacgacagacctcaggagg

SEQ ID NO: 756 - DNA, 23 bp, Homo sapiens
  source 1..23: mol_type = genomic DNA
ccctgagactcggggcgacccgg

SEQ ID NO: 757 - DNA, 23 bp, Homo sapiens
  source 1..23: mol_type = genomic DNA
ccctgcagcgcgcgggtaccagg

SEQ ID NO: 758 - DNA, 23 bp, Homo sapiens
  source 1..23: mol_type = genomic DNA
ccctgccgtcgtaggcgtactgg

SEQ ID NO: 759 - DNA, 23 bp, Homo sapiens
  source 1..23: mol_type = genomic DNA
ccctggtacccgcgcgctgcagg

SEQ ID NO: 760 - DNA, 23 bp, Homo sapiens
  source 1..23: mol_type = genomic DNA
cccttgaagtcacaaaggggagg

SEQ ID NO: 761 - DNA, 23 bp, Homo sapiens
  source 1..23: mol_type = genomic DNA
ccgaccggcgcctcctccgcggg

SEQ ID NO: 762 - DNA, 23 bp, Homo sapiens
  source 1..23: mol_type = genomic DNA
ccgacgggcccctcctccgcggg

SEQ ID NO: 763 - DNA, 23 bp, Homo sapiens
  source 1..23: mol_type = genomic DNA
ccgacgggcgcctcctccacggg

SEQ ID NO: 764 - DNA, 23 bp, Homo sapiens
  source 1..23: mol_type = genomic DNA
ccgacgggcgtctcctccgcggg

SEQ ID NO: 765 - DNA, 23 bp, Homo sapiens
  source 1..23: mol_type = genomic DNA
ccgcccatgaggcggagcagtgg

SEQ ID NO: 766 - DNA, 23 bp, Homo sapiens
  source 1..23: mol_type = genomic DNA
ccgccgcgatccaggagctcagg

SEQ ID NO: 767 - DNA, 23 bp, Homo sapiens
  source 1..23: mol_type = genomic DNA
ccgccgcggtcaaagagcgcagg

SEQ ID NO: 768 - DNA, 23 bp, Homo sapiens
  source 1..23: mol_type = genomic DNA
ccgccgcggtccaggagcttagg

SEQ ID NO: 769 - DNA, 23 bp, Homo sapiens
  source 1..23: mol_type = genomic DNA
ccgccgcggtccgggagctcagg

SEQ ID NO: 770 - DNA, 23 bp, Homo sapiens
  source 1..23: mol_type = genomic DNA
ccgccgcggtctaagagcgcagg

SEQ ID NO: 771 - DNA, 23 bp, Homo sapiens
  source 1..23: mol_type = genomic DNA
ccgcggaggagacgcccgtcggg

SEQ ID NO: 772 - DNA, 23 bp, Homo sapiens
  source 1..23: mol_type = genomic DNA
ccgcggaggaggcgcccatccgg

SEQ ID NO: 773 - DNA, 23 bp, Homo sapiens
  source 1..23: mol_type = genomic DNA
ccgcggaggaggcgcccgccggg

SEQ ID NO: 774 - DNA, 23 bp, Homo sapiens
  source 1..23: mol_type = genomic DNA
ccgcggaggaggcgcccgtaggg

SEQ ID NO: 775 - DNA, 23 bp, Homo sapiens
  source 1..23: mol_type = genomic DNA
ccgcggaggaggcgccggtcggg

SEQ ID NO: 776 - DNA, 23 bp, Homo sapiens
  source 1..23: mol_type = genomic DNA
ccgcggaggaggggcccgtcggg

SEQ ID NO: 777 - DNA, 23 bp, Homo sapiens
  source 1..23: mol_type = genomic DNA
ccgcggcaatccaggagcgcagg

SEQ ID NO: 778 - DNA, 23 bp, Homo sapiens
  source 1..23: mol_type = genomic DNA
ccgcggcggtccaggagggcagg

SEQ ID NO: 779 - DNA, 23 bp, Homo sapiens
  source 1..23: mol_type = genomic DNA
ccgcggtgtccgccgcggtccgg

SEQ ID NO: 780 - DNA, 23 bp, Homo sapiens
  source 1..23: mol_type = genomic DNA
ccgcggtgtccgccgcgtccagg

SEQ ID NO: 781 - DNA, 23 bp, Homo sapiens
  source 1..23: mol_type = genomic DNA
ccggaacacacagatctgcaagg

SEQ ID NO: 782 - DNA, 23 bp, Homo sapiens
  source 1..23: mol_type = genomic DNA
ccggaccgcggcggacaccgcgg

SEQ ID NO: 783 - DNA, 23 bp, Homo sapiens
  source 1..23: mol_type = genomic DNA
ccggacggagtattgggaccggg

SEQ ID NO: 784 - DNA, 23 bp, Homo sapiens
  source 1..23: mol_type = genomic DNA
ccggacgggcgcctcctccgtgg

SEQ ID NO: 785 - DNA, 23 bp, Homo sapiens
  source 1..23: mol_type = genomic DNA
ccggagactcggggcgaccccgg

SEQ ID NO: 786 - DNA, 23 bp, Homo sapiens
  source 1..23: mol_type = genomic DNA
ccggagatctacaggcgatcagg

SEQ ID NO: 787 - DNA, 23 bp, Homo sapiens
  source 1..23: mol_type = genomic DNA
ccggatgggcgcctcctccgcgg

SEQ ID NO: 788 - DNA, 23 bp, Homo sapiens
  source 1..23: mol_type = genomic DNA
ccggccgtacgtgggggatgggg

SEQ ID NO: 789 - DNA, 23 bp, Homo sapiens
  source 1..23: mol_type = genomic DNA
ccggcgggcgcctcctccgcggg

SEQ ID NO: 790 - DNA, 23 bp, Homo sapiens
  source 1..23: mol_type = genomic DNA
ccgggagccatggatagagcagg

SEQ ID NO: 791 - DNA, 23 bp, Homo sapiens
  source 1..23: mol_type = genomic DNA
ccgggccgtacgtcggggttggg

SEQ ID NO: 792 - DNA, 23 bp, Homo sapiens
  source 1..23: mol_type = genomic DNA
ccgggcgatctataggagatggg

SEQ ID NO: 793 - DNA, 23 bp, Homo sapiens
  source 1..23: mol_type = genomic DNA
ccggggtcgccccgagtctccgg

SEQ ID NO: 794 - DNA, 23 bp, Homo sapiens
  source 1..23: mol_type = genomic DNA
ccgggtcgccccgagtctcaggg

SEQ ID NO: 795 - DNA, 23 bp, Homo sapiens
  source 1..23: mol_type = genomic DNA
ccgggtctcacaccctccagagg

SEQ ID NO: 796 - DNA, 23 bp, Homo sapiens
  source 1..23: mol_type = genomic DNA
ccgggtctcctcgagtctctagg

SEQ ID NO: 797 - DNA, 23 bp, Homo sapiens
  source 1..23: mol_type = genomic DNA
ccggtccgcctacgacggcaagg

SEQ ID NO: 798 - DNA, 23 bp, Homo sapiens
  source 1..23: mol_type = genomic DNA
ccgtacgtcggggttggggaggg

SEQ ID NO: 799 - DNA, 23 bp, Homo sapiens
  source 1..23: mol_type = genomic DNA
ccgtcctcggactcgcggcgtgg

SEQ ID NO: 800 - DNA, 23 bp, Homo sapiens
  source 1..23: mol_type = genomic DNA
ccgtgagtgaccccggcccgggg

SEQ ID NO: 801 - DNA, 23 bp, Homo sapiens
  source 1..23: mol_type = genomic DNA
ccgtggaggaggcgcccgtcggg

SEQ ID NO: 802 - DNA, 23 bp, Homo sapiens
  source 1..23: mol_type = genomic DNA
ccgtggtggttgtggtgttgggg

SEQ ID NO: 803 - DNA, 23 bp, Homo sapiens
  source 1..23: mol_type = genomic DNA
ccgtgtcccggcccggcagcggg

SEQ ID NO: 804 - DNA, 23 bp, Homo sapiens
  source 1..23: mol_type = genomic DNA
ccgtgtcccggcctggccgcggg

SEQ ID NO: 805 - DNA, 23 bp, Homo sapiens
  source 1..23: mol_type = genomic DNA
cctaaactgaaaacgaaaccggg

SEQ ID NO: 806 - DNA, 23 bp, Homo sapiens
  source 1..23: mol_type = genomic DNA
cctaagctcctggaccgcggcgg

SEQ ID NO: 807 - DNA, 23 bp, Homo sapiens
  source 1..23: mol_type = genomic DNA
cctacgggcgcctcctccgcggg

SEQ ID NO: 808 - DNA, 23 bp, Homo sapiens
  source 1..23: mol_type = genomic DNA
cctagagactcgaggagacccgg

SEQ ID NO: 809 - DNA, 23 bp, Homo sapiens
  source 1..23: mol_type = genomic DNA
cctcaaggagtgggagcctgggg

SEQ ID NO: 810 - DNA, 23 bp, Homo sapiens
  source 1..23: mol_type = genomic DNA
cctcaccctgagatgggataagg

SEQ ID NO: 811 - DNA, 23 bp, Homo sapiens
  source 1..23: mol_type = genomic DNA
cctcaccctgagatgggttaagg

SEQ ID NO: 812 - DNA, 23 bp, Homo sapiens
  source 1..23: mol_type = genomic DNA
cctcatgaagtgggagcctgggg

SEQ ID NO: 813 - DNA, 23 bp, Homo sapiens
  source 1..23: mol_type = genomic DNA
cctcatggagagggagcctgggg

SEQ ID NO: 814 - DNA, 23 bp, Homo sapiens
  source 1..23: mol_type = genomic DNA
cctcatggagtaggagcctgggg

SEQ ID NO: 815 - DNA, 23 bp, Homo sapiens
  source 1..23: mol_type = genomic DNA
cctcatggagtggaagcctgggg

SEQ ID NO: 816 - DNA, 23 bp, Homo sapiens
  source 1..23: mol_type = genomic DNA
cctcatggagtgggaacctgggg

SEQ ID NO: 817 - DNA, 23 bp, Homo sapiens
  source 1..23: mol_type = genomic DNA
cctccacgagctccgtgtcctgg

SEQ ID NO: 818 - DNA, 23 bp, Homo sapiens
  source 1..23: mol_type = genomic DNA
cctccagaggatgtacggctggg

SEQ ID NO: 819 - DNA, 23 bp, Homo sapiens
  source 1..23: mol_type = genomic DNA
cctcccctttgtgacttcaaggg

SEQ ID NO: 820 - DNA, 23 bp, Homo sapiens
  source 1..23: mol_type = genomic DNA
cctcctccgcgggcataaccagg

SEQ ID NO: 821 - DNA, 23 bp, Homo sapiens
  source 1..23: mol_type = genomic DNA
cctcctcctgctgctctaggggg

SEQ ID NO: 822 - DNA, 23 bp, Homo sapiens
  source 1..23: mol_type = genomic DNA
cctcctgaggtctgtcgtcaggg

SEQ ID NO: 823 - DNA, 23 bp, Homo sapiens
  source 1..23: mol_type = genomic DNA
cctcgaccgcagagagccccagg

SEQ ID NO: 824 - DNA, 23 bp, Homo sapiens
  source 1..23: mol_type = genomic DNA
cctctatggagaggagcgagggg

SEQ ID NO: 825 - DNA, 23 bp, Homo sapiens
  source 1..23: mol_type = genomic DNA
cctctcggtcagtctgtgcctgg

SEQ ID NO: 826 - DNA, 23 bp, Homo sapiens
  source 1..23: mol_type = genomic DNA
cctctctggagacctttatcagg

SEQ ID NO: 827 - DNA, 23 bp, Homo sapiens
  source 1..23: mol_type = genomic DNA
cctctgcggagaggagggagggg

SEQ ID NO: 828 - DNA, 23 bp, Homo sapiens
  source 1..23: mol_type = genomic DNA
cctctgctgagaggagcgagggg

SEQ ID NO: 829 - DNA, 23 bp, Homo sapiens
  source 1..23: mol_type = genomic DNA
cctctggagggtgtgagacccgg

SEQ ID NO: 830 - DNA, 23 bp, Homo sapiens
  source 1..23: mol_type = genomic DNA
cctgacctgcgccaccggccggg

SEQ ID NO: 831 - DNA, 23 bp, Homo sapiens
  source 1..23: mol_type = genomic DNA
cctgacgacagacctcaggaggg

SEQ ID NO: 832 - DNA, 23 bp, Homo sapiens
  source 1..23: mol_type = genomic DNA
cctgagactcggggcgacccggg

SEQ ID NO: 833 - DNA, 23 bp, Homo sapiens
  source 1..23: mol_type = genomic DNA
cctgagctcccggaccgcggcgg

SEQ ID NO: 834 - DNA, 23 bp, Homo sapiens
  source 1..23: mol_type = genomic DNA
cctgagctcctggatcgcggcgg

SEQ ID NO: 835 - DNA, 23 bp, Homo sapiens
  source 1..23: mol_type = genomic DNA
cctgataaaggtctccagagagg

SEQ ID NO: 836 - DNA, 23 bp, Homo sapiens
  source 1..23: mol_type = genomic DNA
cctgatcgcctgtagatctccgg

SEQ ID NO: 837 - DNA, 23 bp, Homo sapiens
  source 1..23: mol_type = genomic DNA
cctgcagacacgtaatgtgaagg

SEQ ID NO: 838 - DNA, 23 bp, Homo sapiens
  source 1..23: mol_type = genomic DNA
cctgcagcgcgcgggtaccaggg

SEQ ID NO: 839 - DNA, 23 bp, Homo sapiens
  source 1..23: mol_type = genomic DNA
cctgccctcctggaccgccgcgg

SEQ ID NO: 840 - DNA, 23 bp, Homo sapiens
  source 1..23: mol_type = genomic DNA
cctgcgctcctggaccgccgggg

SEQ ID NO: 841 - DNA, 23 bp, Homo sapiens
  source 1..23: mol_type = genomic DNA
cctgcgctcctggattgccgcgg

SEQ ID NO: 842 - DNA, 23 bp, Homo sapiens
  source 1..23: mol_type = genomic DNA
cctgcgctcttagaccgcggcgg

SEQ ID NO: 843 - DNA, 23 bp, Homo sapiens
  source 1..23: mol_type = genomic DNA
cctgcgctctttgaccgcggcgg

SEQ ID NO: 844 - DNA, 23 bp, Homo sapiens
  source 1..23: mol_type = genomic DNA
cctgcgtccaggctggtgtttgg

SEQ ID NO: 845 - DNA, 23 bp, Homo sapiens
  source 1..23: mol_type = genomic DNA
cctgcgtccgggctggtgtctgg

SEQ ID NO: 846 - DNA, 23 bp, Homo sapiens
  source 1..23: mol_type = genomic DNA
cctgctctatccatggctcccgg

SEQ ID NO: 847 - DNA, 23 bp, Homo sapiens
  source 1..23: mol_type = genomic DNA
cctgctgctctagggggcagtgg

SEQ ID NO: 848 - DNA, 23 bp, Homo sapiens
  source 1..23: mol_type = genomic DNA
cctggacgcggcggacaccgcgg

SEQ ID NO: 849 - DNA, 23 bp, Homo sapiens
  source 1..23: mol_type = genomic DNA
cctggggctctctgcggtcgagg

SEQ ID NO: 850 - DNA, 23 bp, Homo sapiens
  source 1..23: mol_type = genomic DNA
cctggggcttgaaaccccagtgg

SEQ ID NO: 851 - DNA, 23 bp, Homo sapiens
  source 1..23: mol_type = genomic DNA
cctggtacccgcgcgctgcaggg

SEQ ID NO: 852 - DNA, 23 bp, Homo sapiens
  source 1..23: mol_type = genomic DNA
cctggttatgcccgcggaggagg

SEQ ID NO: 853 - DNA, 23 bp, Homo sapiens
  source 1..23: mol_type = genomic DNA
ccttaacccatctcagggtgagg

SEQ ID NO: 854 - DNA, 23 bp, Homo sapiens
  source 1..23: mol_type = genomic DNA
ccttaatggttgtggtgttgggg

SEQ ID NO: 855 - DNA, 23 bp, Homo sapiens
  source 1..23: mol_type = genomic DNA
ccttatcccatctcagggtgagg

SEQ ID NO: 856 - DNA, 23 bp, Homo sapiens
  source 1..23: mol_type = genomic DNA
ccttcacattacgtgtctgcagg

SEQ ID NO: 857 - DNA, 23 bp, Homo sapiens
  source 1..23: mol_type = genomic DNA
ccttcacattccgcgtctcctgg

SEQ ID NO: 858 - DNA, 23 bp, Homo sapiens
  source 1..23: mol_type = genomic DNA
ccttgcagatctgtgtgttccgg

SEQ ID NO: 859 - DNA, 23 bp, Homo sapiens
  source 1..23: mol_type = genomic DNA
ccttgccatcgtaggcgaactgg

SEQ ID NO: 860 - DNA, 23 bp, Homo sapiens
  source 1..23: mol_type = genomic DNA
ccttgccgtcctaggcggactgg

SEQ ID NO: 861 - DNA, 23 bp, Homo sapiens
  source 1..23: mol_type = genomic DNA
ccttgccgtcgcaggcggactgg

SEQ ID NO: 862 - DNA, 23 bp, Homo sapiens
  source 1..23: mol_type = genomic DNA
ccttgccgtcgtaggagtactgg

SEQ ID NO: 863 - DNA, 23 bp, Homo sapiens
  source 1..23: mol_type = genomic DNA
ccttgccgtcgtaggcaaactgg

SEQ ID NO: 864 - DNA, 23 bp, Homo sapiens
  source 1..23: mol_type = genomic DNA
ccttgccgtcgtaggcggaccgg

SEQ ID NO: 865 - DNA, 23 bp, Homo sapiens
  source 1..23: mol_type = genomic DNA
ccttgccgtcgtaggcgtagtgg

SEQ ID NO: 866 - DNA, 23 bp, Homo sapiens
  source 1..23: mol_type = genomic DNA
ccttgccgtcttaggcggactgg

SEQ ID NO: 867 - DNA, 23 bp, Homo sapiens
  source 1..23: mol_type = genomic DNA
ccttggtggttgtggcgttgggg

SEQ ID NO: 868 - DNA, 23 bp, Homo sapiens
  source 1..23: mol_type = genomic DNA
ccttgtggtcaccgtagctgtgg

SEQ ID NO: 869 - DNA, 23 bp, Homo sapiens
  source 1..23: mol_type = genomic DNA
cgaaaccgggtaaaggtgactgg

SEQ ID NO: 870 - DNA, 23 bp, Homo sapiens
  source 1..23: mol_type = genomic DNA
cgaactggtggtacccgcggagg

SEQ ID NO: 871 - DNA, 23 bp, Homo sapiens
  source 1..23: mol_type = genomic DNA
cgaactggttatacccgtggagg

SEQ ID NO: 872 - DNA, 23 bp, Homo sapiens
  source 1..23: mol_type = genomic DNA
cgacacgcagttcgtgcggttgg

SEQ ID NO: 873 - DNA, 23 bp, Homo sapiens
  source 1..23: mol_type = genomic DNA
cgaccaaccagggggatttttgg

SEQ ID NO: 874 - DNA, 23 bp, Homo sapiens
  source 1..23: mol_type = genomic DNA
cgaccccgcgagtccgagagggg

SEQ ID NO: 875 - DNA, 23 bp, Homo sapiens
  source 1..23: mol_type = genomic DNA
cgacccgcactcacccgcccagg

SEQ ID NO: 876 - DNA, 23 bp, Homo sapiens
  source 1..23: mol_type = genomic DNA
cgacctgccggtacccgcggagg

SEQ ID NO: 877 - DNA, 23 bp, Homo sapiens
  source 1..23: mol_type = genomic DNA
cgacctgcgctcttggaccgcgg

SEQ ID NO: 878 - DNA, 23 bp, Homo sapiens
  source 1..23: mol_type = genomic DNA
cgacgccgcaagtccgagagggg

SEQ ID NO: 879 - DNA, 23 bp, Homo sapiens
  source 1..23: mol_type = genomic DNA
cgacgccgcgagccaaaggatgg

SEQ ID NO: 880 - DNA, 23 bp, Homo sapiens
  source 1..23: mol_type = genomic DNA
cgacgccgcgagtccgagaaggg

SEQ ID NO: 881 - DNA, 23 bp, Homo sapiens
  source 1..23: mol_type = genomic DNA
cgacgccgcgagtccgagggggg

SEQ ID NO: 882 - DNA, 23 bp, Homo sapiens
  source 1..23: mol_type = genomic DNA
cgacgctgcgagtccgaggacgg

SEQ ID NO: 883 - DNA, 23 bp, Homo sapiens
  source 1..23: mol_type = genomic DNA
cgactccgcgagtccaagagggg

SEQ ID NO: 884 - DNA, 23 bp, Homo sapiens
  source 1..23: mol_type = genomic DNA
cgagagaggagccgcgggcgcgg

SEQ ID NO: 885 - DNA, 23 bp, Homo sapiens
  source 1..23: mol_type = genomic DNA
cgagatccgccccgaggccgcgg

SEQ ID NO: 886 - DNA, 23 bp, Homo sapiens
  source 1..23: mol_type = genomic DNA
cgagcagctgagagcctacctgg

SEQ ID NO: 887 - DNA, 23 bp, Homo sapiens
  source 1..23: mol_type = genomic DNA
cgagccaaaggatggagccgcgg

SEQ ID NO: 888 - DNA, 23 bp, Homo sapiens
  source 1..23: mol_type = genomic DNA
cgaggacggtgaccccggcccgg

SEQ ID NO: 889 - DNA, 23 bp, Homo sapiens
  source 1..23: mol_type = genomic DNA
cgagtccgaggacggagccctgg

SEQ ID NO: 890 - DNA, 23 bp, Homo sapiens
  source 1..23: mol_type = genomic DNA
cgagtccgaggatggagccccgg

SEQ ID NO: 891 - DNA, 23 bp, Homo sapiens
  source 1..23: mol_type = genomic DNA
cgagtccgaggatggcgccctgg

SEQ ID NO: 892 - DNA, 23 bp, Homo sapiens
  source 1..23: mol_type = genomic DNA
cgagtccgaggggggagccgcgg

SEQ ID NO: 893 - DNA, 23 bp, Homo sapiens
  source 1..23: mol_type = genomic DNA
cgatatccgccccgaagccgcgg

SEQ ID NO: 894 - DNA, 23 bp, Homo sapiens
  source 1..23: mol_type = genomic DNA
cgatctataggagatggggaagg

SEQ ID NO: 895 - DNA, 23 bp, Homo sapiens
  source 1..23: mol_type = genomic DNA
cgatgaagcagggctccccgcgg

SEQ ID NO: 896 - DNA, 23 bp, Homo sapiens
  source 1..23: mol_type = genomic DNA
cgatgaagcggagctccccgcgg

SEQ ID NO: 897 - DNA, 23 bp, Homo sapiens
  source 1..23: mol_type = genomic DNA
cgatgaagcggggctccccacgg

SEQ ID NO: 898 - DNA, 23 bp, Homo sapiens
  source 1..23: mol_type = genomic DNA
cgatgaagcggggctcctcgcgg

SEQ ID NO: 899 - DNA, 23 bp, Homo sapiens
  source 1..23: mol_type = genomic DNA
cgatgaagcggggttccccgcgg

SEQ ID NO: 900 - DNA, 23 bp, Homo sapiens
  source 1..23: mol_type = genomic DNA
cgatgtatggctgcgacatgggg

SEQ ID NO: 901 - DNA, 23 bp, Homo sapiens
  source 1..23: mol_type = genomic DNA
cgcaagttggaggcggcccgtgg

SEQ ID NO: 902 - DNA, 23 bp, Homo sapiens
  source 1..23: mol_type = genomic DNA
cgcacaggtaccaggggccacgg

SEQ ID NO: 903 - DNA, 23 bp, Homo sapiens
  source 1..23: mol_type = genomic DNA
cgcacgagtaccaggggccacgg

SEQ ID NO: 904 - DNA, 23 bp, Homo sapiens
  source 1..23: mol_type = genomic DNA
cgcacgggccgcctccaacttgg

SEQ ID NO: 905 - DNA, 23 bp, Homo sapiens
  source 1..23: mol_type = genomic DNA
cgcacgggtaccagggaccacgg

SEQ ID NO: 906 - DNA, 23 bp, Homo sapiens
  source 1..23: mol_type = genomic DNA
cgcactggtaccaggggccacgg

SEQ ID NO: 907 - DNA, 23 bp, Homo sapiens
  source 1..23: mol_type = genomic DNA
cgcagccatacatcatctggagg

SEQ ID NO: 908 - DNA, 23 bp, Homo sapiens
  source 1..23: mol_type = genomic DNA
cgcagccatacatccgctggagg

SEQ ID NO: 909 - DNA, 23 bp, Homo sapiens
  source 1..23: mol_type = genomic DNA
cgcagccatacatgctctggagg

SEQ ID NO: 910 - DNA, 23 bp, Homo sapiens
  source 1..23: mol_type = genomic DNA
cgcagccgtacaagctctggagg

SEQ ID NO: 911 - DNA, 23 bp, Homo sapiens
  source 1..23: mol_type = genomic DNA
cgcagccgtacatcctctggcgg

SEQ ID NO: 912 - DNA, 23 bp, Homo sapiens
  source 1..23: mol_type = genomic DNA
cgcagccgtacatcgtctggagg

SEQ ID NO: 913 - DNA, 23 bp, Homo sapiens
  source 1..23: mol_type = genomic DNA
cgcaggagacgttggacaggagg

SEQ ID NO: 914 - DNA, 23 bp, Homo sapiens
  source 1..23: mol_type = genomic DNA
cgccctccctctggtcttgaggg

SEQ ID NO: 915 - DNA, 23 bp, Homo sapiens
  source 1..23: mol_type = genomic DNA
cgccctggatagagcaggagggg

SEQ ID NO: 916 - DNA, 23 bp, Homo sapiens
  source 1..23: mol_type = genomic DNA
cgccgggaggtgggtcgggcggg

SEQ ID NO: 917 - DNA, 23 bp, Homo sapiens
  source 1..23: mol_type = genomic DNA
cgccggtaggagggtcgggcggg

SEQ ID NO: 918 - DNA, 23 bp, Homo sapiens
  source 1..23: mol_type = genomic DNA
cgccgtgggtggagaaggagggg

SEQ ID NO: 919 - DNA, 23 bp, Homo sapiens
  source 1..23: mol_type = genomic DNA
cgccgtgtccgcggcaatccagg

SEQ ID NO: 920 - DNA, 23 bp, Homo sapiens
  source 1..23: mol_type = genomic DNA
cgcctgtagatctccggggctgg

SEQ ID NO: 921 - DNA, 23 bp, Homo sapiens
  source 1..23: mol_type = genomic DNA
cgcgcccgcggctcctctctcgg

SEQ ID NO: 922 - DNA, 23 bp, Homo sapiens
  source 1..23: mol_type = genomic DNA
cgcgcgggtaccaagggcagtgg

SEQ ID NO: 923 - DNA, 23 bp, Homo sapiens
  source 1..23: mol_type = genomic DNA
cgcgcgggtaccggggcagtggg

SEQ ID NO: 924 - DNA, 23 bp, Homo sapiens
  source 1..23: mol_type = genomic DNA
cgcgctgcagcgtctccttccgg

SEQ ID NO: 925 - DNA, 23 bp, Homo sapiens
  source 1..23: mol_type = genomic DNA
cgcggcctcggggcggatctcgg

SEQ ID NO: 926 - DNA, 23 bp, Homo sapiens
  source 1..23: mol_type = genomic DNA
cgcggcttcggggcggatatcgg

SEQ ID NO: 927 - DNA, 23 bp, Homo sapiens
  source 1..23: mol_type = genomic DNA
cgcgggtaccaagggcagtgggg

SEQ ID NO: 928 - DNA, 23 bp, Homo sapiens
  source 1..23: mol_type = genomic DNA
cgcgggtaccaggggccacaggg

SEQ ID NO: 929 - DNA, 23 bp, Homo sapiens
  source 1..23: mol_type = genomic DNA
cgcggtatccgcggcggtccagg

SEQ ID NO: 930 - DNA, 23 bp, Homo sapiens
  source 1..23: mol_type = genomic DNA
cgcggtcagccccgtccccccgg

SEQ ID NO: 931 - DNA, 23 bp, Homo sapiens
  source 1..23: mol_type = genomic DNA
cgcggtggatagagcaggagggg

SEQ ID NO: 932 - DNA, 23 bp, Homo sapiens
  source 1..23: mol_type = genomic DNA
cgcggtgtccgcagcggtccagg

SEQ ID NO: 933 - DNA, 23 bp, Homo sapiens
  source 1..23: mol_type = genomic DNA
cgcggtgtccgccgcgatccagg

SEQ ID NO: 934 - DNA, 23 bp, Homo sapiens
  source 1..23: mol_type = genomic DNA
cgcggtgtccgccgcggtccggg

SEQ ID NO: 935 - DNA, 23 bp, Homo sapiens
  source 1..23: mol_type = genomic DNA
cgctctggttgtagccgcgcagg

SEQ ID NO: 936 - DNA, 23 bp, Homo sapiens
  source 1..23: mol_type = genomic DNA
cgctgcaacgcgcgggtaccagg

SEQ ID NO: 937 - DNA, 23 bp, Homo sapiens
  source 1..23: mol_type = genomic DNA
cgctgcagagcgcgggtaccagg

SEQ ID NO: 938 - DNA, 23 bp, Homo sapiens
  source 1..23: mol_type = genomic DNA
cgctgcagcacgcgggtaccagg

SEQ ID NO: 939 - DNA, 23 bp, Homo sapiens
  source 1..23: mol_type = genomic DNA
cgctgcagcgcacaggtaccagg

SEQ ID NO: 940 - DNA, 23 bp, Homo sapiens
  source 1..23: mol_type = genomic DNA
cgctgcagcgcacgagtaccagg

SEQ ID NO: 941 - DNA, 23 bp, Homo sapiens
  source 1..23: mol_type = genomic DNA
cgctgcagcgcactggtaccagg

SEQ ID NO: 942 - DNA, 23 bp, Homo sapiens
  source 1..23: mol_type = genomic DNA
cgctgcagcgcgcgggtaccggg

SEQ ID NO: 943 - DNA, 23 bp, Homo sapiens
  source 1..23: mol_type = genomic DNA
cgctggagggtgtgagaccctgg

SEQ ID NO: 944 - DNA, 23 bp, Homo sapiens
  source 1..23: mol_type = genomic DNA
cgctgtgtccccggcggtccagg

SEQ ID NO: 945 - DNA, 23 bp, Homo sapiens
  source 1..23: mol_type = genomic DNA
cgcttgtaaggtgagattctggg

SEQ ID NO: 946 - DNA, 23 bp, Homo sapiens
  source 1..23: mol_type = genomic DNA
cggaccggtcatacccgcggagg

SEQ ID NO: 947 - DNA, 23 bp, Homo sapiens
  source 1..23: mol_type = genomic DNA
cggacgggcgcctcctccgtggg

SEQ ID NO: 948 - DNA, 23 bp, Homo sapiens
  source 1..23: mol_type = genomic DNA
cggactgatcatacccgcggagg

SEQ ID NO: 949 - DNA, 23 bp, Homo sapiens
  source 1..23: mol_type = genomic DNA
cggactggccatacccgcggagg

SEQ ID NO: 950 - DNA, 23 bp, Homo sapiens
  source 1..23: mol_type = genomic DNA
cggagatctacaggcgatcaggg

SEQ ID NO: 951 - DNA, 23 bp, Homo sapiens
  source 1..23: mol_type = genomic DNA
cggagcagctgagagcctaccgg

SEQ ID NO: 952 - DNA, 23 bp, Homo sapiens
  source 1..23: mol_type = genomic DNA
cggagtctcccacttgcgctggg

SEQ ID NO: 953 - DNA, 23 bp, Homo sapiens
  source 1..23: mol_type = genomic DNA
cggatgggcgcctcctccgcggg

SEQ ID NO: 954 - DNA, 23 bp, Homo sapiens
  source 1..23: mol_type = genomic DNA
cggatgtatggctgcgacctggg

SEQ ID NO: 955 - DNA, 23 bp, Homo sapiens
  source 1..23: mol_type = genomic DNA
cggcaaggattacatcgccctgg

SEQ ID NO: 956 - DNA, 23 bp, Homo sapiens
  source 1..23: mol_type = genomic DNA
cggccatcctcggcgtctggggg

SEQ ID NO: 957 - DNA, 23 bp, Homo sapiens
  source 1..23: mol_type = genomic DNA
cggcccctcctgctctatccagg

SEQ ID NO: 958 - DNA, 23 bp, Homo sapiens
  source 1..23: mol_type = genomic DNA
cggcccgtccgtggggaatgagg

SEQ ID NO: 959 - DNA, 23 bp, Homo sapiens
  source 1..23: mol_type = genomic DNA
cggcccgtcgggcggagcagcgg

SEQ ID NO: 960 - DNA, 23 bp, Homo sapiens
  source 1..23: mol_type = genomic DNA
cggcccgtgaggcggagcaacgg

SEQ ID NO: 961 - DNA, 23 bp, Homo sapiens
  source 1..23: mol_type = genomic DNA
cggccgcctcccacttgcgctgg

SEQ ID NO: 962 - DNA, 23 bp, Homo sapiens
  source 1..23: mol_type = genomic DNA
cggccggtgaggcggagcagcgg

SEQ ID NO: 963 - DNA, 23 bp, Homo sapiens
  source 1..23: mol_type = genomic DNA
cggcctcagggggcggatctcgg

SEQ ID NO: 964 - DNA, 23 bp, Homo sapiens
  source 1..23: mol_type = genomic DNA
cggcctgtgaggcggagcagcgg

SEQ ID NO: 965 - DNA, 23 bp, Homo sapiens
  source 1..23: mol_type = genomic DNA
cggctactacaacgagagcgagg

SEQ ID NO: 966 - DNA, 23 bp, Homo sapiens
  source 1..23: mol_type = genomic DNA
cggctactataaccagagcgagg

SEQ ID NO: 967 - DNA, 23 bp, Homo sapiens
  source 1..23: mol_type = genomic DNA
cggctactgcaaccagagcgagg

SEQ ID NO: 968 - DNA, 23 bp, Homo sapiens
  source 1..23: mol_type = genomic DNA
cggctagtacaaccagagcgagg

SEQ ID NO: 969 - DNA, 23 bp, Homo sapiens
  source 1..23: mol_type = genomic DNA
cggctccatcctttggctcgcgg

SEQ ID NO: 970 - DNA, 23 bp, Homo sapiens
  source 1..23: mol_type = genomic DNA
cggctcccccctcggactcgcgg

SEQ ID NO: 971 - DNA, 23 bp, Homo sapiens
  source 1..23: mol_type = genomic DNA
cggctcgtgaggcggagcagcgg

SEQ ID NO: 972 - DNA, 23 bp, Homo sapiens
  source 1..23: mol_type = genomic DNA
cggctgcgacctgggcccgacgg

SEQ ID NO: 973 - DNA, 23 bp, Homo sapiens
  source 1..23: mol_type = genomic DNA
cgggaaaggaagggaagatgagg

SEQ ID NO: 974 - DNA, 23 bp, Homo sapiens
  source 1..23: mol_type = genomic DNA
cgggaagccgcgcagggaggagg

SEQ ID NO: 975 - DNA, 23 bp, Homo sapiens
  source 1..23: mol_type = genomic DNA
cgggactcagattctcccgatgg

SEQ ID NO: 976 - DNA, 23 bp, Homo sapiens
  source 1..23: mol_type = genomic DNA
cgggagaatctgagtcccggtgg

SEQ ID NO: 977 - DNA, 23 bp, Homo sapiens
  source 1..23: mol_type = genomic DNA
cgggcatgaccagtccgcctagg

SEQ ID NO: 978 - DNA, 23 bp, Homo sapiens
  source 1..23: mol_type = genomic DNA
cgggccgtacgtcggggttgggg

SEQ ID NO: 979 - DNA, 23 bp, Homo sapiens
  source 1..23: mol_type = genomic DNA
cgggcgatctataggagatgggg

SEQ ID NO: 980 - DNA, 23 bp, Homo sapiens
  source 1..23: mol_type = genomic DNA
cgggcgccgtgggtggaggaggg

SEQ ID NO: 981 - DNA, 23 bp, Homo sapiens
  source 1..23: mol_type = genomic DNA
cggggagccgcgccgggaggtgg

SEQ ID NO: 982 - DNA, 23 bp, Homo sapiens
  source 1..23: mol_type = genomic DNA
cggggagccgcgccggtaggagg

SEQ ID NO: 983 - DNA, 23 bp, Homo sapiens
  source 1..23: mol_type = genomic DNA
cggggagcggcgcagggaggagg

SEQ ID NO: 984 - DNA, 23 bp, Homo sapiens
  source 1..23: mol_type = genomic DNA
cggggagcggcgcagggaggtgg

SEQ ID NO: 985 - DNA, 23 bp, Homo sapiens
  source 1..23: mol_type = genomic DNA
cggggcgccatgacggccatcgg

SEQ ID NO: 986 - DNA, 23 bp, Homo sapiens
  source 1..23: mol_type = genomic DNA
cggggcggggccggggggacggg

SEQ ID NO: 987 - DNA, 23 bp, Homo sapiens
  source 1..23: mol_type = genomic DNA
cggggcggggcggggccgggggg

SEQ ID NO: 988 - DNA, 23 bp, Homo sapiens
  source 1..23: mol_type = genomic DNA
cggggctcgggggacggggctgg

SEQ ID NO: 989 - DNA, 23 bp, Homo sapiens
  source 1..23: mol_type = genomic DNA
cggggctcgggggagctgggcgg

SEQ ID NO: 990 - DNA, 23 bp, Homo sapiens
  source 1..23: mol_type = genomic DNA
cggggctgaccgcggggcctagg

SEQ ID NO: 991 - DNA, 23 bp, Homo sapiens
  source 1..23: mol_type = genomic DNA
cggggctggccgcggggccgggg

SEQ ID NO: 992 - DNA, 23 bp, Homo sapiens
  source 1..23: mol_type = genomic DNA
cggggctggggcggggttcgggg

SEQ ID NO: 993 - DNA, 23 bp, Homo sapiens
  source 1..23: mol_type = genomic DNA
cgggggacggggctggccgcggg

SEQ ID NO: 994 - DNA, 23 bp, Homo sapiens
  source 1..23: mol_type = genomic DNA
cgggggactgggctgaccacggg

SEQ ID NO: 995 - DNA, 23 bp, Homo sapiens
  source 1..23: mol_type = genomic DNA
cgggggagctgggcggggctcgg

SEQ ID NO: 996 - DNA, 23 bp, Homo sapiens
  source 1..23: mol_type = genomic DNA
cgggggctgggctgaccgcgggg

SEQ ID NO: 997 - DNA, 23 bp, Homo sapiens
  source 1..23: mol_type = genomic DNA
cggggtcacagtggacacaaggg

SEQ ID NO: 998 - DNA, 23 bp, Homo sapiens
  source 1..23: mol_type = genomic DNA
cggggtcaccgtcctcgctctgg

SEQ ID NO: 999 - DNA, 23 bp, Homo sapiens
  source 1..23: mol_type = genomic DNA
cggggtcgccccgagtctccggg

SEQ ID NO: 1000 - DNA, 23 bp, Homo sapiens
  source 1..23: mol_type = genomic DNA
cgggtactacaaccagagcgagg

SEQ ID NO: 1001 - DNA, 23 bp, Homo sapiens
  source 1..23: mol_type = genomic DNA
cgggtcccgcggcctcggggcgg

SEQ ID NO: 1002 - DNA, 23 bp, Homo sapiens
  source 1..23: mol_type = genomic DNA
cgggtgagtgcgggtcggcaggg

SEQ ID NO: 1003 - DNA, 23 bp, Homo sapiens
  source 1..23: mol_type = genomic DNA
cggtgaccacaaggacagccagg

SEQ ID NO: 1004 - DNA, 23 bp, Homo sapiens
  source 1..23: mol_type = genomic DNA
cggtgagtgaccccggccggtgg

SEQ ID NO: 1005 - DNA, 23 bp, Homo sapiens
  source 1..23: mol_type = genomic DNA
cggtgcccaaggctgctgcaggg

SEQ ID NO: 1006 - DNA, 23 bp, Homo sapiens
  source 1..23: mol_type = genomic DNA
cgtaacccactgagatgaagcgg

SEQ ID NO: 1007 - DNA, 23 bp, Homo sapiens
  source 1..23: mol_type = genomic DNA
cgtacgtcggggttggggagggg

SEQ ID NO: 1008 - DNA, 23 bp, Homo sapiens
  source 1..23: mol_type = genomic DNA
cgtactggacatacccgcggagg

SEQ ID NO: 1009 - DNA, 23 bp, Homo sapiens
  source 1..23: mol_type = genomic DNA
cgtactggttatacccgcggagg

SEQ ID NO: 1010 - DNA, 23 bp, Homo sapiens
  source 1..23: mol_type = genomic DNA
cgtagcccacagcgatgaagcgg

SEQ ID NO: 1011 - DNA, 23 bp, Homo sapiens
  source 1..23: mol_type = genomic DNA
cgtagcccacggtaatgaagcgg

SEQ ID NO: 1012 - DNA, 23 bp, Homo sapiens
  source 1..23: mol_type = genomic DNA
cgtagcccactgagacgaagcgg

SEQ ID NO: 1013 - DNA, 23 bp, Homo sapiens
  source 1..23: mol_type = genomic DNA
cgtagcgcactgagatgaagcgg

SEQ ID NO: 1014 - DNA, 23 bp, Homo sapiens
  source 1..23: mol_type = genomic DNA
cgtagtggtggtacccgcggagg

SEQ ID NO: 1015 - DNA, 23 bp, Homo sapiens
  source 1..23: mol_type = genomic DNA
cgtcatggagtgggagcctgggg

SEQ ID NO: 1016 - DNA, 23 bp, Homo sapiens
  source 1..23: mol_type = genomic DNA
cgtcctggttatgcccgcggagg

SEQ ID NO: 1017 - DNA, 23 bp, Homo sapiens
  source 1..23: mol_type = genomic DNA
cgtcgcaaccatacatcctctgg

SEQ ID NO: 1018 - DNA, 23 bp, Homo sapiens
  source 1..23: mol_type = genomic DNA
cgtcgcagccatacatgctctgg

SEQ ID NO: 1019 - DNA, 23 bp, Homo sapiens
  source 1..23: mol_type = genomic DNA
cgtcgcagccgtacaagctctgg

SEQ ID NO: 1020 - DNA, 23 bp, Homo sapiens
  source 1..23: mol_type = genomic DNA
cgtcgcagccgtacatcgtctgg

SEQ ID NO: 1021 - DNA, 23 bp, Homo sapiens
  source 1..23: mol_type = genomic DNA
cgtcgcagccttacatcctctgg

SEQ ID NO: 1022 - DNA, 23 bp, Homo sapiens
  source 1..23: mol_type = genomic DNA
cgtcttggggggggtctgtcagg

SEQ ID NO: 1023 - DNA, 23 bp, Homo sapiens
  source 1..23: mol_type = genomic DNA
cgtgccatgtgcagcatgagggg

SEQ ID NO: 1024 - DNA, 23 bp, Homo sapiens
  source 1..23: mol_type = genomic DNA
cgtgctgccggtacccgcggagg

SEQ ID NO: 1025 - DNA, 23 bp, Homo sapiens
  source 1..23: mol_type = genomic DNA
cgtggagaccaggcctgccaggg

SEQ ID NO: 1026 - DNA, 23 bp, Homo sapiens
  source 1..23: mol_type = genomic DNA
cgtggaggccaggcctgcagggg

SEQ ID NO: 1027 - DNA, 23 bp, Homo sapiens
  source 1..23: mol_type = genomic DNA
cgtgtcccggcccggcagcgggg

SEQ ID NO: 1028 - DNA, 23 bp, Homo sapiens
  source 1..23: mol_type = genomic DNA
cgtgtcccggcccggccgcgagg

SEQ ID NO: 1029 - DNA, 23 bp, Homo sapiens
  source 1..23: mol_type = genomic DNA
cgtgtcccggcctggccgcgggg

SEQ ID NO: 1030 - DNA, 23 bp, Homo sapiens
  source 1..23: mol_type = genomic DNA
cgtgtccgcggcggtccaggagg

SEQ ID NO: 1031 - DNA, 23 bp, Homo sapiens
  source 1..23: mol_type = genomic DNA
cgtgtcgtccacatagcccacgg

SEQ ID NO: 1032 - DNA, 23 bp, Homo sapiens
  source 1..23: mol_type = genomic DNA
cgtgtcgtccatgtagcccacgg

SEQ ID NO: 1033 - DNA, 23 bp, Homo sapiens
  source 1..23: mol_type = genomic DNA
cgttggacaggaggaattatggg

SEQ ID NO: 1034 - DNA, 23 bp, Homo sapiens
  source 1..23: mol_type = genomic DNA
ctaactggttatgcccacggagg

SEQ ID NO: 1035 - DNA, 23 bp, Homo sapiens
  source 1..23: mol_type = genomic DNA
ctaagccgcggtgtccgccgcgg

SEQ ID NO: 1036 - DNA, 23 bp, Homo sapiens
  source 1..23: mol_type = genomic DNA
ctaagctgccatgtccgccgcgg

SEQ ID NO: 1037 - DNA, 23 bp, Homo sapiens
  source 1..23: mol_type = genomic DNA
ctaccgggagggcctgtgcgtgg

SEQ ID NO: 1038 - DNA, 23 bp, Homo sapiens
  source 1..23: mol_type = genomic DNA
ctacctggaggacacgtgcgtgg

SEQ ID NO: 1039 - DNA, 23 bp, Homo sapiens
  source 1..23: mol_type = genomic DNA
ctacctggagggaacgtgcgtgg

SEQ ID NO: 1040 - DNA, 23 bp, Homo sapiens
  source 1..23: mol_type = genomic DNA
ctacctggagggcaagtgcgtgg

SEQ ID NO: 1041 - DNA, 23 bp, Homo sapiens
  source 1..23: mol_type = genomic DNA
ctacctggagggcacgcgcgtgg

SEQ ID NO: 1042 - DNA, 23 bp, Homo sapiens
  source 1..23: mol_type = genomic DNA
ctacctggagggcacgtacgtgg

SEQ ID NO: 1043 - DNA, 23 bp, Homo sapiens
  source 1..23: mol_type = genomic DNA
ctacctggagggcacgtgagtgg

SEQ ID NO: 1044 - DNA, 23 bp, Homo sapiens
  source 1..23: mol_type = genomic DNA
ctacctggagggcacgtgcatgg

SEQ ID NO: 1045 - DNA, 23 bp, Homo sapiens
  source 1..23: mol_type = genomic DNA
ctacctggagggcacgtgtgtgg

SEQ ID NO: 1046 - DNA, 23 bp, Homo sapiens
  source 1..23: mol_type = genomic DNA
ctacctggagggcacgttcgtgg

SEQ ID NO: 1047 - DNA, 23 bp, Homo sapiens
  source 1..23: mol_type = genomic DNA
ctacctggagggcctgtgcgagg

SEQ ID NO: 1048 - DNA, 23 bp, Homo sapiens
  source 1..23: mol_type = genomic DNA
ctacctggagggcctgtgtgtgg

SEQ ID NO: 1049 - DNA, 23 bp, Homo sapiens
  source 1..23: mol_type = genomic DNA
ctacctggagggcgagttcgtgg

SEQ ID NO: 1050 - DNA, 23 bp, Homo sapiens
  source 1..23: mol_type = genomic DNA
ctacctggagggtctgtgcgtgg

SEQ ID NO: 1051 - DNA, 23 bp, Homo sapiens
  source 1..23: mol_type = genomic DNA
ctacctggtgggcacgtgcgtgg

SEQ ID NO: 1052 - DNA, 23 bp, Homo sapiens
  source 1..23: mol_type = genomic DNA
ctacgccgcgagtccaagagggg

SEQ ID NO: 1053 - DNA, 23 bp, Homo sapiens
  source 1..23: mol_type = genomic DNA
ctacgtggacgacacgctgttgg

SEQ ID NO: 1054 - DNA, 23 bp, Homo sapiens
  source 1..23: mol_type = genomic DNA
ctagagactcgaggagacccggg

SEQ ID NO: 1055 - DNA, 23 bp, Homo sapiens
  source 1..23: mol_type = genomic DNA
ctaggacagctaggacaaccagg

SEQ ID NO: 1056 - DNA, 23 bp, Homo sapiens
  source 1..23: mol_type = genomic DNA
ctataatatcgccctccctctgg

SEQ ID NO: 1057 - DNA, 23 bp, Homo sapiens
  source 1..23: mol_type = genomic DNA
ctatgtcccggcccggccgcggg

SEQ ID NO: 1058 - DNA, 23 bp, Homo sapiens
  source 1..23: mol_type = genomic DNA
ctcaaggagtgggagcctggggg

SEQ ID NO: 1059 - DNA, 23 bp, Homo sapiens
  source 1..23: mol_type = genomic DNA
ctcacccactcctcgcccccagg

SEQ ID NO: 1060 - DNA, 23 bp, Homo sapiens
  source 1..23: mol_type = genomic DNA
ctcagatcaccaagcacaagtgg

SEQ ID NO: 1061 - DNA, 23 bp, Homo sapiens
  source 1..23: mol_type = genomic DNA
ctcagatcacccagcccaagtgg

SEQ ID NO: 1062 - DNA, 23 bp, Homo sapiens
  source 1..23: mol_type = genomic DNA
ctcagatcacccagcgcaaatgg

SEQ ID NO: 1063 - DNA, 23 bp, Homo sapiens
  source 1..23: mol_type = genomic DNA
ctcagatcacccagcgtaagtgg

SEQ ID NO: 1064 - DNA, 23 bp, Homo sapiens
  source 1..23: mol_type = genomic DNA
ctcagatcaccgagcgcaagtgg

SEQ ID NO: 1065 - DNA, 23 bp, Homo sapiens
  source 1..23: mol_type = genomic DNA
ctcagatcatccagcgcaagtgg

SEQ ID NO: 1066 - DNA, 23 bp, Homo sapiens
  source 1..23: mol_type = genomic DNA
ctcagccactcctggtccccagg

SEQ ID NO: 1067 - DNA, 23 bp, Homo sapiens
  source 1..23: mol_type = genomic DNA
ctcagcccctcctcgctcccagg

SEQ ID NO: 1068 - DNA, 23 bp, Homo sapiens
  source 1..23: mol_type = genomic DNA
ctcagctactcctcgcccccagg

SEQ ID NO: 1069 - DNA, 23 bp, Homo sapiens
  source 1..23: mol_type = genomic DNA
ctcaggcagtgacagtgcccagg

SEQ ID NO: 1070 - DNA, 23 bp, Homo sapiens
  source 1..23: mol_type = genomic DNA
ctcaggctgcatgtaagtgatgg

SEQ ID NO: 1071 - DNA, 23 bp, Homo sapiens
  source 1..23: mol_type = genomic DNA
ctcaggctgcgtgtaaatgatgg

SEQ ID NO: 1072 - DNA, 23 bp, Homo sapiens
  source 1..23: mol_type = genomic DNA
ctcagggaaaccagaagtcctgg

SEQ ID NO: 1073 - DNA, 23 bp, Homo sapiens
  source 1..23: mol_type = genomic DNA
ctcagggtggcttcatggtcagg

SEQ ID NO: 1074 - DNA, 23 bp, Homo sapiens
  source 1..23: mol_type = genomic DNA
ctcatactcaatgtgtctgaagg

SEQ ID NO: 1075 - DNA, 23 bp, Homo sapiens
  source 1..23: mol_type = genomic DNA
ctcatcccattttccattcaagg

SEQ ID NO: 1076 - DNA, 23 bp, Homo sapiens
  source 1..23: mol_type = genomic DNA
ctcatcttcccttcctttcccgg

SEQ ID NO: 1077 - DNA, 23 bp, Homo sapiens
  source 1..23: mol_type = genomic DNA
ctcatgaagtgggagcctggggg

SEQ ID NO: 1078 - DNA, 23 bp, Homo sapiens
  source 1..23: mol_type = genomic DNA
ctcatggagagggagcctggggg

SEQ ID NO: 1079 - DNA, 23 bp, Homo sapiens
  source 1..23: mol_type = genomic DNA
ctcatggagtaggagcctggggg

SEQ ID NO: 1080 - DNA, 23 bp, Homo sapiens
  source 1..23: mol_type = genomic DNA
ctcatggagtggaagcctggggg

SEQ ID NO: 1081 - DNA, 23 bp, Homo sapiens
  source 1..23: mol_type = genomic DNA
ctcatggagtgggaacctggggg

SEQ ID NO: 1082 - DNA, 23 bp, Homo sapiens
  source 1..23: mol_type = genomic DNA
ctcattccccacggacgggccgg

SEQ ID NO: 1083 - DNA, 23 bp, Homo sapiens
  source 1..23: mol_type = genomic DNA
ctccacagggtagaaacccaggg

SEQ ID NO: 1084 - DNA, 23 bp, Homo sapiens
  source 1..23: mol_type = genomic DNA
ctccacagggtagaagcccaggg

SEQ ID NO: 1085 - DNA, 23 bp, Homo sapiens
  source 1..23: mol_type = genomic DNA
ctccacagggtagaagctcaggg

SEQ ID NO: 1086 - DNA, 23 bp, Homo sapiens
  source 1..23: mol_type = genomic DNA
ctcccaaacacaatatccaaagg

SEQ ID NO: 1087 - DNA, 23 bp, Homo sapiens
  source 1..23: mol_type = genomic DNA
ctccctcaagaccagagggaggg

SEQ ID NO: 1088 - DNA, 23 bp, Homo sapiens
  source 1..23: mol_type = genomic DNA
ctccctccttaacccatctcagg

SEQ ID NO: 1089 - DNA, 23 bp, Homo sapiens
  source 1..23: mol_type = genomic DNA
ctccctccttatcccatctcagg

SEQ ID NO: 1090 - DNA, 23 bp, Homo sapiens
  source 1..23: mol_type = genomic DNA
ctccgcagacacctgaagaatgg

SEQ ID NO: 1091 - DNA, 23 bp, Homo sapiens
  source 1..23: mol_type = genomic DNA
ctccgcagatacctgaagaaagg

SEQ ID NO: 1092 - DNA, 23 bp, Homo sapiens
  source 1..23: mol_type = genomic DNA
ctccgcagatacctggagaaagg

SEQ ID NO: 1093 - DNA, 23 bp, Homo sapiens
  source 1..23: mol_type = genomic DNA
ctccgcagatacctggagaatgg

SEQ ID NO: 1094 - DNA, 23 bp, Homo sapiens
  source 1..23: mol_type = genomic DNA
ctccgcagatacctggggaacgg

SEQ ID NO: 1095 - DNA, 23 bp, Homo sapiens
  source 1..23: mol_type = genomic DNA
ctccgcagatatctggagaacgg

SEQ ID NO: 1096 - DNA, 23 bp, Homo sapiens
  source 1..23: mol_type = genomic DNA
ctccgcagggtagaagcacaggg

SEQ ID NO: 1097 - DNA, 23 bp, Homo sapiens
  source 1..23: mol_type = genomic DNA
ctccgcagggtagaagcccatgg

SEQ ID NO: 1098 - DNA, 23 bp, Homo sapiens
  source 1..23: mol_type = genomic DNA
ctccgcctcccacttgcgcttgg

SEQ ID NO: 1099 - DNA, 23 bp, Homo sapiens
  source 1..23: mol_type = genomic DNA
ctccggatgatgtgagaccctgg

SEQ ID NO: 1100 - DNA, 23 bp, Homo sapiens
  source 1..23: mol_type = genomic DNA
ctcctaccggcgcggctccccgg

SEQ ID NO: 1101 - DNA, 23 bp, Homo sapiens
  source 1..23: mol_type = genomic DNA
ctcctatagatcgcccgggatgg

SEQ ID NO: 1102 - DNA, 23 bp, Homo sapiens
  source 1..23: mol_type = genomic DNA
ctcctccctgcgccgctccccgg

SEQ ID NO: 1103 - DNA, 23 bp, Homo sapiens
  source 1..23: mol_type = genomic DNA
ctcctccctgcgcggcttcccgg

SEQ ID NO: 1104 - DNA, 23 bp, Homo sapiens
  source 1..23: mol_type = genomic DNA
ctcctggattgccgcggacacgg

SEQ ID NO: 1105 - DNA, 23 bp, Homo sapiens
  source 1..23: mol_type = genomic DNA
ctcctgtccaacgtctcctgcgg

SEQ ID NO: 1106 - DNA, 23 bp, Homo sapiens
  source 1..23: mol_type = genomic DNA
ctcgacgggcgcctcctccgcgg

SEQ ID NO: 1107 - DNA, 23 bp, Homo sapiens
  source 1..23: mol_type = genomic DNA
ctcgcacaggccctccaggtagg

SEQ ID NO: 1108 - DNA, 23 bp, Homo sapiens
  source 1..23: mol_type = genomic DNA
ctcgcggccgggccgggacacgg

SEQ ID NO: 1109 - DNA, 23 bp, Homo sapiens
  source 1..23: mol_type = genomic DNA
ctcggagccccgcggcttcgggg

SEQ ID NO: 1110 - DNA, 23 bp, Homo sapiens
  source 1..23: mol_type = genomic DNA
ctcgggggctgggctgaccgcgg

SEQ ID NO: 1111 - DNA, 23 bp, Homo sapiens
  source 1..23: mol_type = genomic DNA
ctcgtggaggccaggcctgcagg

SEQ ID NO: 1112 - DNA, 23 bp, Homo sapiens
  source 1..23: mol_type = genomic DNA
ctcgttgtagtagccgcgcaggg

SEQ ID NO: 1113 - DNA, 23 bp, Homo sapiens
  source 1..23: mol_type = genomic DNA
ctctcaactgctccgcctcacgg

SEQ ID NO: 1114 - DNA, 23 bp, Homo sapiens
  source 1..23: mol_type = genomic DNA
ctctcaactgctcctccacacgg

SEQ ID NO: 1115 - DNA, 23 bp, Homo sapiens
  source 1..23: mol_type = genomic DNA
ctctcaactgctctgccacacgg

SEQ ID NO: 1116 - DNA, 23 bp, Homo sapiens
  source 1..23: mol_type = genomic DNA
ctctcagctgctccgccacatgg

SEQ ID NO: 1117 - DNA, 23 bp, Homo sapiens
  source 1..23: mol_type = genomic DNA
ctctcagctgctccgccacccgg

SEQ ID NO: 1118 - DNA, 23 bp, Homo sapiens
  source 1..23: mol_type = genomic DNA
ctctcagctgctccgccccacgg

SEQ ID NO: 1119 - DNA, 23 bp, Homo sapiens
  source 1..23: mol_type = genomic DNA
ctctcagctgctcggccgcacgg

SEQ ID NO: 1120 - DNA, 23 bp, Homo sapiens
  source 1..23: mol_type = genomic DNA
ctctccgctgctccgcccgacgg

SEQ ID NO: 1121 - DNA, 23 bp, Homo sapiens
  source 1..23: mol_type = genomic DNA
ctctccgtcagtctgtgcctggg

SEQ ID NO: 1122 - DNA, 23 bp, Homo sapiens
  source 1..23: mol_type = genomic DNA
ctctccgttgctccgcctcacgg

SEQ ID NO: 1123 - DNA, 23 bp, Homo sapiens
  source 1..23: mol_type = genomic DNA
ctctcggtaagtctgtgccttgg

SEQ ID NO: 1124 - DNA, 23 bp, Homo sapiens
  source 1..23: mol_type = genomic DNA
ctctcggtacgtctgtgtgttgg

SEQ ID NO: 1125 - DNA, 23 bp, Homo sapiens
  source 1..23: mol_type = genomic DNA
ctctcggtcagcctgtgtgttgg

SEQ ID NO: 1126 - DNA, 23 bp, Homo sapiens
  source 1..23: mol_type = genomic DNA
ctctcgttaagtctgtgtgttgg

SEQ ID NO: 1127 - DNA, 23 bp, Homo sapiens
  source 1..23: mol_type = genomic DNA
ctctctgcggtcgaggttctggg

SEQ ID NO: 1128 - DNA, 23 bp, Homo sapiens
  source 1..23: mol_type = genomic DNA
ctctctgctgctccgccacacgg

SEQ ID NO: 1129 - DNA, 23 bp, Homo sapiens
  source 1..23: mol_type = genomic DNA
ctctctgctgctccgcctcatgg

SEQ ID NO: 1130 - DNA, 23 bp, Homo sapiens
  source 1..23: mol_type = genomic DNA
ctctctggagacctttatcaggg

SEQ ID NO: 1131 - DNA, 23 bp, Homo sapiens
  source 1..23: mol_type = genomic DNA
ctctgcactgctccgcctcacgg

SEQ ID NO: 1132 - DNA, 23 bp, Homo sapiens
  source 1..23: mol_type = genomic DNA
ctctggacggtgtgagaccctgg

SEQ ID NO: 1133 - DNA, 23 bp, Homo sapiens
  source 1..23: mol_type = genomic DNA
ctctggagagtgtgagaccctgg

SEQ ID NO: 1134 - DNA, 23 bp, Homo sapiens
  source 1..23: mol_type = genomic DNA
ctctggagggtatgagaccctgg

SEQ ID NO: 1135 - DNA, 23 bp, Homo sapiens
  source 1..23: mol_type = genomic DNA
ctctggatgctgtgagaacctgg

SEQ ID NO: 1136 - DNA, 23 bp, Homo sapiens
  source 1..23: mol_type = genomic DNA
ctctggcgggtgtgagaccctgg

SEQ ID NO: 1137 - DNA, 23 bp, Homo sapiens
  source 1..23: mol_type = genomic DNA
ctctgtcctgctccgccatacgg

SEQ ID NO: 1138 - DNA, 23 bp, Homo sapiens
  source 1..23: mol_type = genomic DNA
ctcttagaccgcggcggacatgg

SEQ ID NO: 1139 - DNA, 23 bp, Homo sapiens
  source 1..23: mol_type = genomic DNA
ctcttagctgctccgccacacgg

SEQ ID NO: 1140 - DNA, 23 bp, Homo sapiens
  source 1..23: mol_type = genomic DNA
ctcttggaccgcggcggacacgg

SEQ ID NO: 1141 - DNA, 23 bp, Homo sapiens
  source 1..23: mol_type = genomic DNA
ctctttgaccgcggcggacatgg

SEQ ID NO: 1142 - DNA, 23 bp, Homo sapiens
  source 1..23: mol_type = genomic DNA
ctgaaaacgaaaccgggtaaagg

SEQ ID NO: 1143 - DNA, 23 bp, Homo sapiens
  source 1..23: mol_type = genomic DNA
ctgaagggctccaggacttctgg

SEQ ID NO: 1144 - DNA, 23 bp, Homo sapiens
  source 1..23: mol_type = genomic DNA
ctgaccgcgagggctgggccagg

SEQ ID NO: 1145 - DNA, 23 bp, Homo sapiens
  source 1..23: mol_type = genomic DNA
ctgaccgcggggcctaggccagg

SEQ ID NO: 1146 - DNA, 23 bp, Homo sapiens
  source 1..23: mol_type = genomic DNA
ctgaccgcggggtccgggctagg

SEQ ID NO: 1147 - DNA, 23 bp, Homo sapiens
  source 1..23: mol_type = genomic DNA
ctgaccgcggggtcgaggccagg

SEQ ID NO: 1148 - DNA, 23 bp, Homo sapiens
  source 1..23: mol_type = genomic DNA
ctgacctgcgccaccggccgggg

SEQ ID NO: 1149 - DNA, 23 bp, Homo sapiens
  source 1..23: mol_type = genomic DNA
ctgagccgcggtatccgcggcgg

SEQ ID NO: 1150 - DNA, 23 bp, Homo sapiens
  source 1..23: mol_type = genomic DNA
ctgagccgcggtgtccgcagcgg

SEQ ID NO: 1151 - DNA, 23 bp, Homo sapiens
  source 1..23: mol_type = genomic DNA
ctgagccgctgtgtccccggcgg

SEQ ID NO: 1152 - DNA, 23 bp, Homo sapiens
  source 1..23: mol_type = genomic DNA
ctgagctgccgtgtccgccgcgg

SEQ ID NO: 1153 - DNA, 23 bp, Homo sapiens
  source 1..23: mol_type = genomic DNA
ctgatcgcctgtagatctccggg

SEQ ID NO: 1154 - DNA, 23 bp, Homo sapiens
  source 1..23: mol_type = genomic DNA
ctgcaacgcgcgggtaccagggg

SEQ ID NO: 1155 - DNA, 23 bp, Homo sapiens
  source 1..23: mol_type = genomic DNA
ctgcagacccaggcgggatcagg

SEQ ID NO: 1156 - DNA, 23 bp, Homo sapiens
  source 1..23: mol_type = genomic DNA
ctgcagagcgcgggtaccagggg

SEQ ID NO: 1157 - DNA, 23 bp, Homo sapiens
  source 1..23: mol_type = genomic DNA
ctgcagcacgcgggtaccagggg

SEQ ID NO: 1158 - DNA, 23 bp, Homo sapiens
  source 1..23: mol_type = genomic DNA
ctgcagcgcacaggtaccagggg

SEQ ID NO: 1159 - DNA, 23 bp, Homo sapiens
  source 1..23: mol_type = genomic DNA
ctgcagcgcacgagtaccagggg

SEQ ID NO: 1160 - DNA, 23 bp, Homo sapiens
  source 1..23: mol_type = genomic DNA
ctgcagcgcactggtaccagggg

SEQ ID NO: 1161 - DNA, 23 bp, Homo sapiens
  source 1..23: mol_type = genomic DNA
ctgcagcgcgcgggtaccaaggg

SEQ ID NO: 1162 - DNA, 23 bp, Homo sapiens
  source 1..23: mol_type = genomic DNA
ctgcatgtaagtgatggcggtgg

SEQ ID NO: 1163 - DNA, 23 bp, Homo sapiens
  source 1..23: mol_type = genomic DNA
ctgccccacactcagtgtttggg

SEQ ID NO: 1164 - DNA, 23 bp, Homo sapiens
  source 1..23: mol_type = genomic DNA
ctgccccctagagcagcaggagg

SEQ ID NO: 1165 - DNA, 23 bp, Homo sapiens
  source 1..23: mol_type = genomic DNA
ctgcccggccccgaccaaccagg

SEQ ID NO: 1166 - DNA, 23 bp, Homo sapiens
  source 1..23: mol_type = genomic DNA
ctgcctggagggcgagtgcgtgg

SEQ ID NO: 1167 - DNA, 23 bp, Homo sapiens
  source 1..23: mol_type = genomic DNA
ctgccttgtgtgggactgaaagg

SEQ ID NO: 1168 - DNA, 23 bp, Homo sapiens
  source 1..23: mol_type = genomic DNA
ctgcggagatcacacggacctgg

SEQ ID NO: 1169 - DNA, 23 bp, Homo sapiens
  source 1..23: mol_type = genomic DNA
ctgcggagatcacactgatctgg

SEQ ID NO: 1170 - DNA, 23 bp, Homo sapiens
  source 1..23: mol_type = genomic DNA
ctgcggtcgaggttctgggcggg

SEQ ID NO: 1171 - DNA, 23 bp, Homo sapiens
  source 1..23: mol_type = genomic DNA
ctgcgtccaggctggtgtttggg

SEQ ID NO: 1172 - DNA, 23 bp, Homo sapiens
  source 1..23: mol_type = genomic DNA
ctgcgtccgggctggtgtctggg

SEQ ID NO: 1173 - DNA, 23 bp, Homo sapiens
  source 1..23: mol_type = genomic DNA
ctgcgtgtaaatgatggcggcgg

SEQ ID NO: 1174 - DNA, 23 bp, Homo sapiens
  source 1..23: mol_type = genomic DNA
ctgcgtgtaagtgatgccggtgg

SEQ ID NO: 1175 - DNA, 23 bp, Homo sapiens
  source 1..23: mol_type = genomic DNA
ctgctctatccatggctcccggg

SEQ ID NO: 1176 - DNA, 23 bp, Homo sapiens
  source 1..23: mol_type = genomic DNA
ctgctgtctaggacaattaaggg

SEQ ID NO: 1177 - DNA, 23 bp, Homo sapiens
  source 1..23: mol_type = genomic DNA
ctggaaacccgacacccaatagg

SEQ ID NO: 1178 - DNA, 23 bp, Homo sapiens
  source 1..23: mol_type = genomic DNA
ctggaaacccgacacccaattgg

SEQ ID NO: 1179 - DNA, 23 bp, Homo sapiens
  source 1..23: mol_type = genomic DNA
ctggaaacccgacacccgatggg

SEQ ID NO: 1180 - DNA, 23 bp, Homo sapiens
  source 1..23: mol_type = genomic DNA
ctggaccaatcgccctcctgagg

SEQ ID NO: 1181 - DNA, 23 bp, Homo sapiens
  source 1..23: mol_type = genomic DNA
ctggaccgccgcggataccgcgg

SEQ ID NO: 1182 - DNA, 23 bp, Homo sapiens
  source 1..23: mol_type = genomic DNA
ctggaccgccggggacacagcgg

SEQ ID NO: 1183 - DNA, 23 bp, Homo sapiens
  source 1..23: mol_type = genomic DNA
ctggaccgctgcggacaccgcgg

SEQ ID NO: 1184 - DNA, 23 bp, Homo sapiens
  source 1..23: mol_type = genomic DNA
ctggagcccttcagcagggtcgg

SEQ ID NO: 1185 - DNA, 23 bp, Homo sapiens
  source 1..23: mol_type = genomic DNA
ctggatagagcaggaggggccgg

SEQ ID NO: 1186 - DNA, 23 bp, Homo sapiens
  source 1..23: mol_type = genomic DNA
ctggatcgcggcggacaccgcgg

SEQ ID NO: 1187 - DNA, 23 bp, Homo sapiens
  source 1..23: mol_type = genomic DNA
ctggattgccgcggacacggcgg

SEQ ID NO: 1188 - DNA, 23 bp, Homo sapiens
  source 1..23: mol_type = genomic DNA
ctggccgcggggccggggccagg

SEQ ID NO: 1189 - DNA, 23 bp, Homo sapiens
  source 1..23: mol_type = genomic DNA
ctggcctggtctccacaagctgg

SEQ ID NO: 1190 - DNA, 23 bp, Homo sapiens
  source 1..23: mol_type = genomic DNA
ctgggaaaaggggaaggtgaggg

SEQ ID NO: 1191 - DNA, 23 bp, Homo sapiens
  source 1..23: mol_type = genomic DNA
ctgggcactgtcactgcctgagg

SEQ ID NO: 1192 - DNA, 23 bp, Homo sapiens
  source 1..23: mol_type = genomic DNA
ctgggcggggctcgggggctggg

SEQ ID NO: 1193 - DNA, 23 bp, Homo sapiens
  source 1..23: mol_type = genomic DNA
ctgggcgggtgagtgcgggtcgg

SEQ ID NO: 1194 - DNA, 23 bp, Homo sapiens
  source 1..23: mol_type = genomic DNA
ctgggctgaccacgggggcgggg

SEQ ID NO: 1195 - DNA, 23 bp, Homo sapiens
  source 1..23: mol_type = genomic DNA
ctgggctgaccgcgagggctggg

SEQ ID NO: 1196 - DNA, 23 bp, Homo sapiens
  source 1..23: mol_type = genomic DNA
ctgggctgaccgcggggtcgagg

SEQ ID NO: 1197 - DNA, 23 bp, Homo sapiens
  source 1..23: mol_type = genomic DNA
ctggggcggggttcgggggacgg

SEQ ID NO: 1198 - DNA, 23 bp, Homo sapiens
  source 1..23: mol_type = genomic DNA
ctggggcttgaaaccccagtggg

SEQ ID NO: 1199 - DNA, 23 bp, Homo sapiens
  source 1..23: mol_type = genomic DNA
ctggggggggggggggcagaggg

SEQ ID NO: 1200 - DNA, 23 bp, Homo sapiens
  source 1..23: mol_type = genomic DNA
ctgggttttgttgtcccactggg

SEQ ID NO: 1201 - DNA, 23 bp, Homo sapiens
  source 1..23: mol_type = genomic DNA
ctggtcatacccgcggaggaggg

SEQ ID NO: 1202 - DNA, 23 bp, Homo sapiens
  source 1..23: mol_type = genomic DNA
ctggttgcagtagccgcgcaggg

SEQ ID NO: 1203 - DNA, 23 bp, Homo sapiens
  source 1..23: mol_type = genomic DNA
ctggttggtcggggccgggcagg

SEQ ID NO: 1204 - DNA, 23 bp, Homo sapiens
  source 1..23: mol_type = genomic DNA
ctggttgtactagccgcgcaggg

SEQ ID NO: 1205 - DNA, 23 bp, Homo sapiens
  source 1..23: mol_type = genomic DNA
ctggttgtagtacccgcgcaggg

SEQ ID NO: 1206 - DNA, 23 bp, Homo sapiens
  source 1..23: mol_type = genomic DNA
ctggttgtagtagccgtgcaggg

SEQ ID NO: 1207 - DNA, 23 bp, Homo sapiens
  source 1..23: mol_type = genomic DNA
ctggttgtcctagctgtcctagg

SEQ ID NO: 1208 - DNA, 23 bp, Homo sapiens
  source 1..23: mol_type = genomic DNA
ctgtaggacagctgcctgtgtgg

SEQ ID NO: 1209 - DNA, 23 bp, Homo sapiens
  source 1..23: mol_type = genomic DNA
ctgtgccccttccctaccccagg

SEQ ID NO: 1210 - DNA, 23 bp, Homo sapiens
  source 1..23: mol_type = genomic DNA
ctgttccggtcccaatactccgg

SEQ ID NO: 1211 - DNA, 23 bp, Homo sapiens
  source 1..23: mol_type = genomic DNA
cttaacccatctcagggtgaggg

SEQ ID NO: 1212 - DNA, 23 bp, Homo sapiens
  source 1..23: mol_type = genomic DNA
cttagaccaccaagcacaagtgg

SEQ ID NO: 1213 - DNA, 23 bp, Homo sapiens
  source 1..23: mol_type = genomic DNA
cttagatcacccagcgcaagtgg

SEQ ID NO: 1214 - DNA, 23 bp, Homo sapiens
  source 1..23: mol_type = genomic DNA
cttatcccatctcagggtgaggg

SEQ ID NO: 1215 - DNA, 23 bp, Homo sapiens
  source 1..23: mol_type = genomic DNA
cttcagacacattgagtatgagg

SEQ ID NO: 1216 - DNA, 23 bp, Homo sapiens
  source 1..23: mol_type = genomic DNA
cttcatcaccgtgggctatgtgg

SEQ ID NO: 1217 - DNA, 23 bp, Homo sapiens
  source 1..23: mol_type = genomic DNA
cttcatcgccgtgggctacatgg

SEQ ID NO: 1218 - DNA, 23 bp, Homo sapiens
  source 1..23: mol_type = genomic DNA
cttcatcgctgtgggctacgtgg

SEQ ID NO: 1219 - DNA, 23 bp, Homo sapiens
  source 1..23: mol_type = genomic DNA
cttcatctcagtgcgctacgtgg

SEQ ID NO: 1220 - DNA, 23 bp, Homo sapiens
  source 1..23: mol_type = genomic DNA
cttcatctcagtgggttacgtgg

SEQ ID NO: 1221 - DNA, 23 bp, Homo sapiens
  source 1..23: mol_type = genomic DNA
cttcatggagtgggaggctgggg

SEQ ID NO: 1222 - DNA, 23 bp, Homo sapiens
  source 1..23: mol_type = genomic DNA
cttcatggtcagagacagcttgg

SEQ ID NO: 1223 - DNA, 23 bp, Homo sapiens
  source 1..23: mol_type = genomic DNA
cttcatggtcagggacagcgtgg

SEQ ID NO: 1224 - DNA, 23 bp, Homo sapiens
  source 1..23: mol_type = genomic DNA
cttcattaccgtgggctacgtgg

SEQ ID NO: 1225 - DNA, 23 bp, Homo sapiens
  source 1..23: mol_type = genomic DNA
cttccagaagtgggaggctgtgg

SEQ ID NO: 1226 - DNA, 23 bp, Homo sapiens
  source 1..23: mol_type = genomic DNA
cttcccctgactcatgatgctgg

SEQ ID NO: 1227 - DNA, 23 bp, Homo sapiens
  source 1..23: mol_type = genomic DNA
cttcctcctacacatcttagcgg

SEQ ID NO: 1228 - DNA, 23 bp, Homo sapiens
  source 1..23: mol_type = genomic DNA
cttcggtaaggagggggatgagg

SEQ ID NO: 1229 - DNA, 23 bp, Homo sapiens
  source 1..23: mol_type = genomic DNA
cttcgtctcagtgggctacgtgg

SEQ ID NO: 1230 - DNA, 23 bp, Homo sapiens
  source 1..23: mol_type = genomic DNA
cttgctctatccatggcgcccgg

SEQ ID NO: 1231 - DNA, 23 bp, Homo sapiens
  source 1..23: mol_type = genomic DNA
cttggggtctagagtgggcaggg

SEQ ID NO: 1232 - DNA, 23 bp, Homo sapiens
  source 1..23: mol_type = genomic DNA
cttgtggagaccaagcctgcagg

SEQ ID NO: 1233 - DNA, 23 bp, Homo sapiens
  source 1..23: mol_type = genomic DNA
cttgtggagaccagaccggcagg

SEQ ID NO: 1234 - DNA, 23 bp, Homo sapiens
  source 1..23: mol_type = genomic DNA
cttgtggagaccagacctgcagg

SEQ ID NO: 1235 - DNA, 23 bp, Homo sapiens
  source 1..23: mol_type = genomic DNA
cttgtggagaccaggcgagcagg

SEQ ID NO: 1236 - DNA, 23 bp, Homo sapiens
  source 1..23: mol_type = genomic DNA
cttgtgtcgggtccttcttccgg

SEQ ID NO: 1237 - DNA, 23 bp, Homo sapiens
  source 1..23: mol_type = genomic DNA
ctttcaactgctccgccacatgg

SEQ ID NO: 1238 - DNA, 23 bp, Homo sapiens
  source 1..23: mol_type = genomic DNA
ctttgccgtcgtaggcgtcctgg

SEQ ID NO: 1239 - DNA, 23 bp, Homo sapiens
  source 1..23: mol_type = genomic DNA
gaaaccgggtaaaggcacctggg

SEQ ID NO: 1240 - DNA, 23 bp, Homo sapiens
  source 1..23: mol_type = genomic DNA
gaaaccgggtaaagtcgcctggg

SEQ ID NO: 1241 - DNA, 23 bp, Homo sapiens
  source 1..23: mol_type = genomic DNA
gaaaccgggttaaaggcgcctgg

SEQ ID NO: 1242 - DNA, 23 bp, Homo sapiens
  source 1..23: mol_type = genomic DNA
gaaatacttcatggagtgggagg

SEQ ID NO: 1243 - DNA, 23 bp, Homo sapiens
  source 1..23: mol_type = genomic DNA
gaaccccgcttcatcgccgtggg

SEQ ID NO: 1244 - DNA, 23 bp, Homo sapiens
  source 1..23: mol_type = genomic DNA
gaaccgtgacctttcctctcagg

SEQ ID NO: 1245 - DNA, 23 bp, Homo sapiens
  source 1..23: mol_type = genomic DNA
gaagaaggaccccacaagttggg

SEQ ID NO: 1246 - DNA, 23 bp, Homo sapiens
  source 1..23: mol_type = genomic DNA
gaagacggctctgggaaaagggg

SEQ ID NO: 1247 - DNA, 23 bp, Homo sapiens
  source 1..23: mol_type = genomic DNA
gaagagttctggtagggaagggg

SEQ ID NO: 1248 - DNA, 23 bp, Homo sapiens
  source 1..23: mol_type = genomic DNA
gaagcacaagcgccaggcacagg

SEQ ID NO: 1249 - DNA, 23 bp, Homo sapiens
  source 1..23: mol_type = genomic DNA
gaagcagggctccccgcggccgg

SEQ ID NO: 1250 - DNA, 23 bp, Homo sapiens
  source 1..23: mol_type = genomic DNA
gaagccaatcagcgttgccgcgg

SEQ ID NO: 1251 - DNA, 23 bp, Homo sapiens
  source 1..23: mol_type = genomic DNA
gaagcccctcatgctgtacatgg

SEQ ID NO: 1252 - DNA, 23 bp, Homo sapiens
  source 1..23: mol_type = genomic DNA
gaagcggagctccccgcggccgg

SEQ ID NO: 1253 - DNA, 23 bp, Homo sapiens
  source 1..23: mol_type = genomic DNA
gaagcgggactctccgcggccgg

SEQ ID NO: 1254 - DNA, 23 bp, Homo sapiens
  source 1..23: mol_type = genomic DNA
gaagcggggctccccacggccgg

SEQ ID NO: 1255 - DNA, 23 bp, Homo sapiens
  source 1..23: mol_type = genomic DNA
gaagcggggctccccgcagccgg

SEQ ID NO: 1256 - DNA, 23 bp, Homo sapiens
  source 1..23: mol_type = genomic DNA
gaagcggggctccccgctgccgg

SEQ ID NO: 1257 - DNA, 23 bp, Homo sapiens
  source 1..23: mol_type = genomic DNA
gaagcggggctcctcgcggccgg

SEQ ID NO: 1258 - DNA, 23 bp, Homo sapiens
  source 1..23: mol_type = genomic DNA
gaagcggggttccccgcggccgg

SEQ ID NO: 1259 - DNA, 23 bp, Homo sapiens
  source 1..23: mol_type = genomic DNA
gaaggaaacgctgcagcgcacgg

SEQ ID NO: 1260 - DNA, 23 bp, Homo sapiens
  source 1..23: mol_type = genomic DNA
gaaggaaacgctgcagcgcgcgg

SEQ ID NO: 1261 - DNA, 23 bp, Homo sapiens
  source 1..23: mol_type = genomic DNA
gaaggacggatgtatcaccgtgg

SEQ ID NO: 1262 - DNA, 23 bp, Homo sapiens
  source 1..23: mol_type = genomic DNA
gaaggagaccctgcagcgcgcgg

SEQ ID NO: 1263 - DNA, 23 bp, Homo sapiens
  source 1..23: mol_type = genomic DNA
gaaggagacgctgcaacgcgcgg

SEQ ID NO: 1264 - DNA, 23 bp, Homo sapiens
  source 1..23: mol_type = genomic DNA
gaaggagacgctgcagagcgcgg

SEQ ID NO: 1265 - DNA, 23 bp, Homo sapiens
  source 1..23: mol_type = genomic DNA
gaaggagacgctgcagcacgcgg

SEQ ID NO: 1266 - DNA, 23 bp, Homo sapiens
  source 1..23: mol_type = genomic DNA
gaaggagacgctggagcgcgcgg

SEQ ID NO: 1267 - DNA, 23 bp, Homo sapiens
  source 1..23: mol_type = genomic DNA
gaaggagatgctgcagcgcacgg

SEQ ID NO: 1268 - DNA, 23 bp, Homo sapiens
  source 1..23: mol_type = genomic DNA
gaaggaggggccggagtattggg

SEQ ID NO: 1269 - DNA, 23 bp, Homo sapiens
  source 1..23: mol_type = genomic DNA
gaagtcgctgttccctcgtcagg

SEQ ID NO: 1270 - DNA, 23 bp, Homo sapiens
  source 1..23: mol_type = genomic DNA
gaagtcgctgttccctctgcagg

SEQ ID NO: 1271 - DNA, 23 bp, Homo sapiens
  source 1..23: mol_type = genomic DNA
gaagtgaaactcagggaagtggg

SEQ ID NO: 1272 - DNA, 23 bp, Homo sapiens
  source 1..23: mol_type = genomic DNA
gaagtgaaactcttgggagtggg

SEQ ID NO: 1273 - DNA, 23 bp, Homo sapiens
  source 1..23: mol_type = genomic DNA
gaagtgggagcctgggggcgagg

SEQ ID NO: 1274 - DNA, 23 bp, Homo sapiens
  source 1..23: mol_type = genomic DNA
gaatgtgaagaaatacctcatgg

SEQ ID NO: 1275 - DNA, 23 bp, Homo sapiens
  source 1..23: mol_type = genomic DNA
gacaagaggaattatggggcggg

SEQ ID NO: 1276 - DNA, 23 bp, Homo sapiens
  source 1..23: mol_type = genomic DNA
gacacaaaagtacaagcgccagg

SEQ ID NO: 1277 - DNA, 23 bp, Homo sapiens
  source 1..23: mol_type = genomic DNA
gacacagaagaacaagcgccagg

SEQ ID NO: 1278 - DNA, 23 bp, Homo sapiens
  source 1..23: mol_type = genomic DNA
gacacagaagcacaagcgccagg

SEQ ID NO: 1279 - DNA, 23 bp, Homo sapiens
  source 1..23: mol_type = genomic DNA
gacacagatctgcaaggcccagg

SEQ ID NO: 1280 - DNA, 23 bp, Homo sapiens
  source 1..23: mol_type = genomic DNA
gacaccgccacgtcccggcccgg

SEQ ID NO: 1281 - DNA, 23 bp, Homo sapiens
  source 1..23: mol_type = genomic DNA
gacaccgccgtgtcctggcccgg

SEQ ID NO: 1282 - DNA, 23 bp, Homo sapiens
  source 1..23: mol_type = genomic DNA
gacacctgatcagtattctaggg

SEQ ID NO: 1283 - DNA, 23 bp, Homo sapiens
  source 1..23: mol_type = genomic DNA
gacatctctgaggaaatggaggg

SEQ ID NO: 1284 - DNA, 23 bp, Homo sapiens
  source 1..23: mol_type = genomic DNA
gaccacagcgaccacagctacgg

SEQ ID NO: 1285 - DNA, 23 bp, Homo sapiens
  source 1..23: mol_type = genomic DNA
gacccagttctcactccaattgg

SEQ ID NO: 1286 - DNA, 23 bp, Homo sapiens
  source 1..23: mol_type = genomic DNA
gacccagttctcactcccatcgg

SEQ ID NO: 1287 - DNA, 23 bp, Homo sapiens
  source 1..23: mol_type = genomic DNA
gacccagttctcactcctattgg

SEQ ID NO: 1288 - DNA, 23 bp, Homo sapiens
  source 1..23: mol_type = genomic DNA
gacccctcattccccacggacgg

SEQ ID NO: 1289 - DNA, 23 bp, Homo sapiens
  source 1..23: mol_type = genomic DNA
gacccctgatcagtattataggg

SEQ ID NO: 1290 - DNA, 23 bp, Homo sapiens
  source 1..23: mol_type = genomic DNA
gacccgcccgacccacctcccgg

SEQ ID NO: 1291 - DNA, 23 bp, Homo sapiens
  source 1..23: mol_type = genomic DNA
gacccgcccgaccctcctaccgg

SEQ ID NO: 1292 - DNA, 23 bp, Homo sapiens
  source 1..23: mol_type = genomic DNA
gaccgtgagtgaccccggcccgg

SEQ ID NO: 1293 - DNA, 23 bp, Homo sapiens
  source 1..23: mol_type = genomic DNA
gacctgacagcgggatggggagg

SEQ ID NO: 1294 - DNA, 23 bp, Homo sapiens
  source 1..23: mol_type = genomic DNA
gacctgcgctcctggaccgccgg

SEQ ID NO: 1295 - DNA, 23 bp, Homo sapiens
  source 1..23: mol_type = genomic DNA
gacctggcagcgggatagggagg

SEQ ID NO: 1296 - DNA, 23 bp, Homo sapiens
  source 1..23: mol_type = genomic DNA
gacctggcagcgggatggcaagg

SEQ ID NO: 1297 - DNA, 23 bp, Homo sapiens
  source 1..23: mol_type = genomic DNA
gacctggtagcgggatggcgagg

SEQ ID NO: 1298 - DNA, 23 bp, Homo sapiens
  source 1..23: mol_type = genomic DNA
gacgagggaacagcgacttctgg

SEQ ID NO: 1299 - DNA, 23 bp, Homo sapiens
  source 1..23: mol_type = genomic DNA
gacgatgtatggctgcgacatgg

SEQ ID NO: 1300 - DNA, 23 bp, Homo sapiens
  source 1..23: mol_type = genomic DNA
gacgcagaagtacaagcgccagg

SEQ ID NO: 1301 - DNA, 23 bp, Homo sapiens
  source 1..23: mol_type = genomic DNA
gacgccgagaatggccgtcatgg

SEQ ID NO: 1302 - DNA, 23 bp, Homo sapiens
  source 1..23: mol_type = genomic DNA
gacgccgaggatggccatcatgg

SEQ ID NO: 1303 - DNA, 23 bp, Homo sapiens
  source 1..23: mol_type = genomic DNA
gacgccgcgagtccgagaagggg

SEQ ID NO: 1304 - DNA, 23 bp, Homo sapiens
  source 1..23: mol_type = genomic DNA
gacggagccccgggcgccgtggg

SEQ ID NO: 1305 - DNA, 23 bp, Homo sapiens
  source 1..23: mol_type = genomic DNA
gacggccattctcggcgtctggg

SEQ ID NO: 1306 - DNA, 23 bp, Homo sapiens
  source 1..23: mol_type = genomic DNA
gacggggctctcagtgtctcagg

SEQ ID NO: 1307 - DNA, 23 bp, Homo sapiens
  source 1..23: mol_type = genomic DNA
gacggggctggccgcggggccgg

SEQ ID NO: 1308 - DNA, 23 bp, Homo sapiens
  source 1..23: mol_type = genomic DNA
gacggtgagtgaccccggcctgg

SEQ ID NO: 1309 - DNA, 23 bp, Homo sapiens
  source 1..23: mol_type = genomic DNA
gacggtgtgagaacctagcccgg

SEQ ID NO: 1310 - DNA, 23 bp, Homo sapiens
  source 1..23: mol_type = genomic DNA
gacggtgtgagaccctggcccgg

SEQ ID NO: 1311 - DNA, 23 bp, Homo sapiens
  source 1..23: mol_type = genomic DNA
gactccgagacccttgccccggg

SEQ ID NO: 1312 - DNA, 23 bp, Homo sapiens
  source 1..23: mol_type = genomic DNA
gactgggctgaccacgggggcgg

SEQ ID NO: 1313 - DNA, 23 bp, Homo sapiens
  source 1..23: mol_type = genomic DNA
gacttgtgactgctgggttcagg

SEQ ID NO: 1314 - DNA, 23 bp, Homo sapiens
  source 1..23: mol_type = genomic DNA
gagaattctagtccctgaagagg

SEQ ID NO: 1315 - DNA, 23 bp, Homo sapiens
  source 1..23: mol_type = genomic DNA
gagacactgagagccccgtccgg

SEQ ID NO: 1316 - DNA, 23 bp, Homo sapiens
  source 1..23: mol_type = genomic DNA
gagaccaagcctgcaggggatgg

SEQ ID NO: 1317 - DNA, 23 bp, Homo sapiens
  source 1..23: mol_type = genomic DNA
gagaccaggcgagcaggagatgg

SEQ ID NO: 1318 - DNA, 23 bp, Homo sapiens
  source 1..23: mol_type = genomic DNA
gagacccgggccgtacgtcgggg

SEQ ID NO: 1319 - DNA, 23 bp, Homo sapiens
  source 1..23: mol_type = genomic DNA
gagacctgggcgggtgagtgcgg

SEQ ID NO: 1320 - DNA, 23 bp, Homo sapiens
  source 1..23: mol_type = genomic DNA
gagactgaccgagtggacctggg

SEQ ID NO: 1321 - DNA, 23 bp, Homo sapiens
  source 1..23: mol_type = genomic DNA
gagagcctgcgaaacctgcgcgg

SEQ ID NO: 1322 - DNA, 23 bp, Homo sapiens
  source 1..23: mol_type = genomic DNA
gagagcctgcggaccctgcgcgg

SEQ ID NO: 1323 - DNA, 23 bp, Homo sapiens
  source 1..23: mol_type = genomic DNA
gagagcctgcggatcctgcgcgg

SEQ ID NO: 1324 - DNA, 23 bp, Homo sapiens
  source 1..23: mol_type = genomic DNA
gagagcctggggaccaggagtgg

SEQ ID NO: 1325 - DNA, 23 bp, Homo sapiens
  source 1..23: mol_type = genomic DNA
gagaggagccgcgggcgcggtgg

SEQ ID NO: 1326 - DNA, 23 bp, Homo sapiens
  source 1..23: mol_type = genomic DNA
gagatcccagaaaggagtcaggg

SEQ ID NO: 1327 - DNA, 23 bp, Homo sapiens
  source 1..23: mol_type = genomic DNA
gagatccgccccgaggccgcggg

SEQ ID NO: 1328 - DNA, 23 bp, Homo sapiens
  source 1..23: mol_type = genomic DNA
gagcaccgcttcatctcagtggg

SEQ ID NO: 1329 - DNA, 23 bp, Homo sapiens
  source 1..23: mol_type = genomic DNA
gagcagcaggaggagagttcggg

SEQ ID NO: 1330 - DNA, 23 bp, Homo sapiens
  source 1..23: mol_type = genomic DNA
gagcagcaggatgagggttcagg

SEQ ID NO: 1331 - DNA, 23 bp, Homo sapiens
  source 1..23: mol_type = genomic DNA
gagcatgtacggctgcgacctgg

SEQ ID NO: 1332 - DNA, 23 bp, Homo sapiens
  source 1..23: mol_type = genomic DNA
gagcatgtatggctgcgacgtgg

SEQ ID NO: 1333 - DNA, 23 bp, Homo sapiens
  source 1..23: mol_type = genomic DNA
gagccaaaggatggagccgcggg

SEQ ID NO: 1334 - DNA, 23 bp, Homo sapiens
  source 1..23: mol_type = genomic DNA
gagccatggatagagcaggaggg

SEQ ID NO: 1335 - DNA, 23 bp, Homo sapiens
  source 1..23: mol_type = genomic DNA
gagccccaaacactgagtgtggg

SEQ ID NO: 1336 - DNA, 23 bp, Homo sapiens
  source 1..23: mol_type = genomic DNA
gagccccaggcgactttacccgg

SEQ ID NO: 1337 - DNA, 23 bp, Homo sapiens
  source 1..23: mol_type = genomic DNA
gagccccaggcgcctttacccgg

SEQ ID NO: 1338 - DNA, 23 bp, Homo sapiens
  source 1..23: mol_type = genomic DNA
gagccccgcttcatcgctgtggg

SEQ ID NO: 1339 - DNA, 23 bp, Homo sapiens
  source 1..23: mol_type = genomic DNA
gagccccgcttcattaccgtggg

SEQ ID NO: 1340 - DNA, 23 bp, Homo sapiens
  source 1..23: mol_type = genomic DNA
gagccccgcttcgtctcagtggg

SEQ ID NO: 1341 - DNA, 23 bp, Homo sapiens
  source 1..23: mol_type = genomic DNA
gagcccctcagcctccactcagg

SEQ ID NO: 1342 - DNA, 23 bp, Homo sapiens
  source 1..23: mol_type = genomic DNA
gagccctgcttcatcgccgtggg

SEQ ID NO: 1343 - DNA, 23 bp, Homo sapiens
  source 1..23: mol_type = genomic DNA
gagccgcctcccacttgcgctgg

SEQ ID NO: 1344 - DNA, 23 bp, Homo sapiens
  source 1..23: mol_type = genomic DNA
gagccgtggatggagcaggaggg

SEQ ID NO: 1345 - DNA, 23 bp, Homo sapiens
  source 1..23: mol_type = genomic DNA
gagctcaggtagggaaggggtgg

SEQ ID NO: 1346 - DNA, 23 bp, Homo sapiens
  source 1..23: mol_type = genomic DNA
gagctccccgcggccgggccagg

SEQ ID NO: 1347 - DNA, 23 bp, Homo sapiens
  source 1..23: mol_type = genomic DNA
gagctccgcttcatcgcagtggg

SEQ ID NO: 1348 - DNA, 23 bp, Homo sapiens
  source 1..23: mol_type = genomic DNA
gagctcctccacacgcccaccgg

SEQ ID NO: 1349 - DNA, 23 bp, Homo sapiens
  source 1..23: mol_type = genomic DNA
gagcttgtacggctgcgacgtgg

SEQ ID NO: 1350 - DNA, 23 bp, Homo sapiens
  source 1..23: mol_type = genomic DNA
gaggacctgcggaacctgcgcgg

SEQ ID NO: 1351 - DNA, 23 bp, Homo sapiens
  source 1..23: mol_type = genomic DNA
gaggacctgcggaccctgcgcgg

SEQ ID NO: 1352 - DNA, 23 bp, Homo sapiens
  source 1..23: mol_type = genomic DNA
gaggacggtgaccccggcccggg

SEQ ID NO: 1353 - DNA, 23 bp, Homo sapiens
  source 1..23: mol_type = genomic DNA
gaggagggaacagcgacctctgg

SEQ ID NO: 1354 - DNA, 23 bp, Homo sapiens
  source 1..23: mol_type = genomic DNA
gaggatgtaaggctgcgacgtgg

SEQ ID NO: 1355 - DNA, 23 bp, Homo sapiens
  source 1..23: mol_type = genomic DNA
gaggatgtacggctgggacctgg

SEQ ID NO: 1356 - DNA, 23 bp, Homo sapiens
  source 1..23: mol_type = genomic DNA
gaggatgtatggttgcgacgtgg

SEQ ID NO: 1357 - DNA, 23 bp, Homo sapiens
  source 1..23: mol_type = genomic DNA
gaggatgtctggctgcgacccgg

SEQ ID NO: 1358 - DNA, 23 bp, Homo sapiens
  source 1..23: mol_type = genomic DNA
gaggccaggcctgcaggggatgg

SEQ ID NO: 1359 - DNA, 23 bp, Homo sapiens
  source 1..23: mol_type = genomic DNA
gaggcccaggtgcctttacccgg

SEQ ID NO: 1360 - DNA, 23 bp, Homo sapiens
  source 1..23: mol_type = genomic DNA
gaggcccttgaagtcacaaaggg

SEQ ID NO: 1361 - DNA, 23 bp, Homo sapiens
  source 1..23: mol_type = genomic DNA
gaggcctgcgccccgggccgggg

SEQ ID NO: 1362 - DNA, 23 bp, Homo sapiens
  source 1..23: mol_type = genomic DNA
gaggctgtggtggtgccttctgg

SEQ ID NO: 1363 - DNA, 23 bp, Homo sapiens
  source 1..23: mol_type = genomic DNA
gagggagcctgggggcgaggagg

SEQ ID NO: 1364 - DNA, 23 bp, Homo sapiens
  source 1..23: mol_type = genomic DNA
gagggcaccgcagatacctgtgg

SEQ ID NO: 1365 - DNA, 23 bp, Homo sapiens
  source 1..23: mol_type = genomic DNA
gagggccccctctgctgtctagg

SEQ ID NO: 1366 - DNA, 23 bp, Homo sapiens
  source 1..23: mol_type = genomic DNA
gaggggagccgcaggcgccgtgg

SEQ ID NO: 1367 - DNA, 23 bp, Homo sapiens
  source 1..23: mol_type = genomic DNA
gaggggcccgaccctcctcccgg

SEQ ID NO: 1368 - DNA, 23 bp, Homo sapiens
  source 1..23: mol_type = genomic DNA
gaggggccggaatattgggacgg

SEQ ID NO: 1369 - DNA, 23 bp, Homo sapiens
  source 1..23: mol_type = genomic DNA
gaggggccggacggagtattggg

SEQ ID NO: 1370 - DNA, 23 bp, Homo sapiens
  source 1..23: mol_type = genomic DNA
gaggggcttcggtaaggaggggg

SEQ ID NO: 1371 - DNA, 23 bp, Homo sapiens
  source 1..23: mol_type = genomic DNA
gaggtcgctgttccctcctcagg

SEQ ID NO: 1372 - DNA, 23 bp, Homo sapiens
  source 1..23: mol_type = genomic DNA
gaggtgggtgagctcccccatgg

SEQ ID NO: 1373 - DNA, 23 bp, Homo sapiens
  source 1..23: mol_type = genomic DNA
gaggttcccctaaaatcacatgg

SEQ ID NO: 1374 - DNA, 23 bp, Homo sapiens
  source 1..23: mol_type = genomic DNA
gaggttctgggcgggtcccgcgg

SEQ ID NO: 1375 - DNA, 23 bp, Homo sapiens
  source 1..23: mol_type = genomic DNA
gagtcactctctggaaacccagg

SEQ ID NO: 1376 - DNA, 23 bp, Homo sapiens
  source 1..23: mol_type = genomic DNA
gagtccaagaggggagccgcagg

SEQ ID NO: 1377 - DNA, 23 bp, Homo sapiens
  source 1..23: mol_type = genomic DNA
gagtcccgcttcatctcagtggg

SEQ ID NO: 1378 - DNA, 23 bp, Homo sapiens
  source 1..23: mol_type = genomic DNA
gagtccgagaaggggagccgcgg

SEQ ID NO: 1379 - DNA, 23 bp, Homo sapiens
  source 1..23: mol_type = genomic DNA
gagtccgaggacggagccctggg

SEQ ID NO: 1380 - DNA, 23 bp, Homo sapiens
  source 1..23: mol_type = genomic DNA
gagtccgaggatggagccccggg

SEQ ID NO: 1381 - DNA, 23 bp, Homo sapiens
  source 1..23: mol_type = genomic DNA
gagtccgaggatggcgccctggg

SEQ ID NO: 1382 - DNA, 23 bp, Homo sapiens
  source 1..23: mol_type = genomic DNA
gagtccgaggggggagccgcggg

SEQ ID NO: 1383 - DNA, 23 bp, Homo sapiens
  source 1..23: mol_type = genomic DNA
gagtggcccgaccctcctcccgg

SEQ ID NO: 1384 - DNA, 23 bp, Homo sapiens
  source 1..23: mol_type = genomic DNA
gagtggctccgcagatacctggg

SEQ ID NO: 1385 - DNA, 23 bp, Homo sapiens
  source 1..23: mol_type = genomic DNA
gagtgggcaggggggtggtgggg

SEQ ID NO: 1386 - DNA, 23 bp, Homo sapiens
  source 1..23: mol_type = genomic DNA
gagtgggcggggggggggtgggg

SEQ ID NO: 1387 - DNA, 23 bp, Homo sapiens
  source 1..23: mol_type = genomic DNA
gatagagcaggaggtgccggagg

SEQ ID NO: 1388 - DNA, 23 bp, Homo sapiens
  source 1..23: mol_type = genomic DNA
gatatccgccccgaagccgcggg

SEQ ID NO: 1389 - DNA, 23 bp, Homo sapiens
  source 1..23: mol_type = genomic DNA
gatatcggacccggagactgtgg

SEQ ID NO: 1390 - DNA, 23 bp, Homo sapiens
  source 1..23: mol_type = genomic DNA
gatcacacggacctggcagcggg

SEQ ID NO: 1391 - DNA, 23 bp, Homo sapiens
  source 1..23: mol_type = genomic DNA
gatcacactgacctgacagcggg

SEQ ID NO: 1392 - DNA, 23 bp, Homo sapiens
  source 1..23: mol_type = genomic DNA
gatcacactgacctggtagcggg

SEQ ID NO: 1393 - DNA, 23 bp, Homo sapiens
  source 1..23: mol_type = genomic DNA
gatcacactgatctggcagtggg

SEQ ID NO: 1394 - DNA, 23 bp, Homo sapiens
  source 1..23: mol_type = genomic DNA
gatcaccaagcacaagtgggagg

SEQ ID NO: 1395 - DNA, 23 bp, Homo sapiens
  source 1..23: mol_type = genomic DNA
gatcacccagcacaagttggagg

SEQ ID NO: 1396 - DNA, 23 bp, Homo sapiens
  source 1..23: mol_type = genomic DNA
gatcacccagcccaagtgggagg

SEQ ID NO: 1397 - DNA, 23 bp, Homo sapiens
  source 1..23: mol_type = genomic DNA
gatcacccagcccaagttggagg

SEQ ID NO: 1398 - DNA, 23 bp, Homo sapiens
  source 1..23: mol_type = genomic DNA
gatcacccagcgcaaatgggagg

SEQ ID NO: 1399 - DNA, 23 bp, Homo sapiens
  source 1..23: mol_type = genomic DNA
gatcacccagcgtaagtgggagg

SEQ ID NO: 1400 - DNA, 23 bp, Homo sapiens
  source 1..23: mol_type = genomic DNA
gatcaccgagcgcaagtgggagg

SEQ ID NO: 1401 - DNA, 23 bp, Homo sapiens
  source 1..23: mol_type = genomic DNA
gatcactcagcgcaagttggagg

SEQ ID NO: 1402 - DNA, 23 bp, Homo sapiens
  source 1..23: mol_type = genomic DNA
gatcatccagcgcaagtgggagg

SEQ ID NO: 1403 - DNA, 23 bp, Homo sapiens
  source 1..23: mol_type = genomic DNA
gatccgccccctgaggccgcggg

SEQ ID NO: 1404 - DNA, 23 bp, Homo sapiens
  source 1..23: mol_type = genomic DNA
gatctcggaccctgagactcggg

SEQ ID NO: 1405 - DNA, 23 bp, Homo sapiens
  source 1..23: mol_type = genomic DNA
gatctgagccgcggtatccgcgg

SEQ ID NO: 1406 - DNA, 23 bp, Homo sapiens
  source 1..23: mol_type = genomic DNA
gatctgagccgctgtgtccccgg

SEQ ID NO: 1407 - DNA, 23 bp, Homo sapiens
  source 1..23: mol_type = genomic DNA
gatctggcagtgggatggggagg

SEQ ID NO: 1408 - DNA, 23 bp, Homo sapiens
  source 1..23: mol_type = genomic DNA
gatcttcaagaccaacacacagg

SEQ ID NO: 1409 - DNA, 23 bp, Homo sapiens
  source 1..23: mol_type = genomic DNA
gatgctgtgagaacctggcccgg

SEQ ID NO: 1410 - DNA, 23 bp, Homo sapiens
  source 1..23: mol_type = genomic DNA
gatggccatcctcggcgtctggg

SEQ ID NO: 1411 - DNA, 23 bp, Homo sapiens
  source 1..23: mol_type = genomic DNA
gatgggataaggagggagatggg

SEQ ID NO: 1412 - DNA, 23 bp, Homo sapiens
  source 1..23: mol_type = genomic DNA
gatgggttaaggagggagatggg

SEQ ID NO: 1413 - DNA, 23 bp, Homo sapiens
  source 1..23: mol_type = genomic DNA
gatgtaagccttgccgtcgtagg

SEQ ID NO: 1414 - DNA, 23 bp, Homo sapiens
  source 1..23: mol_type = genomic DNA
gatgtaatccctgccgtcgtagg

SEQ ID NO: 1415 - DNA, 23 bp, Homo sapiens
  source 1..23: mol_type = genomic DNA
gatgtaatccttgccatcgtagg

SEQ ID NO: 1416 - DNA, 23 bp, Homo sapiens
  source 1..23: mol_type = genomic DNA
gatgtaatccttgccgtcctagg

SEQ ID NO: 1417 - DNA, 23 bp, Homo sapiens
  source 1..23: mol_type = genomic DNA
gatgtaatccttgccgtcgcagg

SEQ ID NO: 1418 - DNA, 23 bp, Homo sapiens
  source 1..23: mol_type = genomic DNA
gatgtaatccttgccttcgtagg

SEQ ID NO: 1419 - DNA, 23 bp, Homo sapiens
  source 1..23: mol_type = genomic DNA
gatgtatcaccttgatattatgg

SEQ ID NO: 1420 - DNA, 23 bp, Homo sapiens
  source 1..23: mol_type = genomic DNA
gatgtcatccttgccgtcgtagg

SEQ ID NO: 1421 - DNA, 23 bp, Homo sapiens
  source 1..23: mol_type = genomic DNA
gattacccagcgcaagttggagg

SEQ ID NO: 1422 - DNA, 23 bp, Homo sapiens
  source 1..23: mol_type = genomic DNA
gattccagcatcatgagtcaggg

SEQ ID NO: 1423 - DNA, 23 bp, Homo sapiens
  source 1..23: mol_type = genomic DNA
gattccagcattcatgagtcggg

SEQ ID NO: 1424 - DNA, 23 bp, Homo sapiens
  source 1..23: mol_type = genomic DNA
gattctcccgatggccgtcatgg

SEQ ID NO: 1425 - DNA, 23 bp, Homo sapiens
  source 1..23: mol_type = genomic DNA
gcaaccatacatcctctggatgg

SEQ ID NO: 1426 - DNA, 23 bp, Homo sapiens
  source 1..23: mol_type = genomic DNA
gcaacggagagcctacctggagg

SEQ ID NO: 1427 - DNA, 23 bp, Homo sapiens
  source 1..23: mol_type = genomic DNA
gcaagggtctcggagtcccgcgg

SEQ ID NO: 1428 - DNA, 23 bp, Homo sapiens
  source 1..23: mol_type = genomic DNA
gcaagttggaggcggcccgtggg

SEQ ID NO: 1429 - DNA, 23 bp, Homo sapiens
  source 1..23: mol_type = genomic DNA
gcacagggcccagcacctcaggg

SEQ ID NO: 1430 - DNA, 23 bp, Homo sapiens
  source 1..23: mol_type = genomic DNA
gcacaggtaccaggggccacggg

SEQ ID NO: 1431 - DNA, 23 bp, Homo sapiens
  source 1..23: mol_type = genomic DNA
gcacatgtgacaatgaaagacgg

SEQ ID NO: 1432 - DNA, 23 bp, Homo sapiens
  source 1..23: mol_type = genomic DNA
gcaccgtgacttttcctctcagg

SEQ ID NO: 1433 - DNA, 23 bp, Homo sapiens
  source 1..23: mol_type = genomic DNA
gcacctgcatgtgtctgtgttgg

SEQ ID NO: 1434 - DNA, 23 bp, Homo sapiens
  source 1..23: mol_type = genomic DNA
gcacgagtaccaggggccacggg

SEQ ID NO: 1435 - DNA, 23 bp, Homo sapiens
  source 1..23: mol_type = genomic DNA
gcacgggccgcctccaacttggg

SEQ ID NO: 1436 - DNA, 23 bp, Homo sapiens
  source 1..23: mol_type = genomic DNA
gcacgggtaccagggaccacggg

SEQ ID NO: 1437 - DNA, 23 bp, Homo sapiens
  source 1..23: mol_type = genomic DNA
gcactcacccgcccaggtctcgg

SEQ ID NO: 1438 - DNA, 23 bp, Homo sapiens
  source 1..23: mol_type = genomic DNA
gcactggtaccaggggccacggg

SEQ ID NO: 1439 - DNA, 23 bp, Homo sapiens
  source 1..23: mol_type = genomic DNA
gcagagggaacagcgacttctgg

SEQ ID NO: 1440 - DNA, 23 bp, Homo sapiens
  source 1..23: mol_type = genomic DNA
gcagcacgcctacgacggcaagg

SEQ ID NO: 1441 - DNA, 23 bp, Homo sapiens
  source 1..23: mol_type = genomic DNA
gcagccaaacatcctctggacgg

SEQ ID NO: 1442 - DNA, 23 bp, Homo sapiens
  source 1..23: mol_type = genomic DNA
gcagccatacatcatctggaggg

SEQ ID NO: 1443 - DNA, 23 bp, Homo sapiens
  source 1..23: mol_type = genomic DNA
gcagccatacatccgctggaggg

SEQ ID NO: 1444 - DNA, 23 bp, Homo sapiens
  source 1..23: mol_type = genomic DNA
gcagccatacatgctctggaggg

SEQ ID NO: 1445 - DNA, 23 bp, Homo sapiens
  source 1..23: mol_type = genomic DNA
gcagcccctcatgctgcacatgg

SEQ ID NO: 1446 - DNA, 23 bp, Homo sapiens
  source 1..23: mol_type = genomic DNA
gcagcccctcatgctgtacctgg

SEQ ID NO: 1447 - DNA, 23 bp, Homo sapiens
  source 1..23: mol_type = genomic DNA
gcagccgggccgggacatggcgg

SEQ ID NO: 1448 - DNA, 23 bp, Homo sapiens
  source 1..23: mol_type = genomic DNA
gcagccgtacaagctctggaggg

SEQ ID NO: 1449 - DNA, 23 bp, Homo sapiens
  source 1..23: mol_type = genomic DNA
gcagccgtacatcctctggatgg

SEQ ID NO: 1450 - DNA, 23 bp, Homo sapiens
  source 1..23: mol_type = genomic DNA
gcagccgtacatcctctggcggg

SEQ ID NO: 1451 - DNA, 23 bp, Homo sapiens
  source 1..23: mol_type = genomic DNA
gcagccgtacatcgtctggaggg

SEQ ID NO: 1452 - DNA, 23 bp, Homo sapiens
  source 1..23: mol_type = genomic DNA
gcagcggagaacctacctggagg

SEQ ID NO: 1453 - DNA, 23 bp, Homo sapiens
  source 1..23: mol_type = genomic DNA
gcagctaagagcctacctggagg

SEQ ID NO: 1454 - DNA, 23 bp, Homo sapiens
  source 1..23: mol_type = genomic DNA
gcagctgagagcctaccgggagg

SEQ ID NO: 1455 - DNA, 23 bp, Homo sapiens
  source 1..23: mol_type = genomic DNA
gcagctgagagcctacctggtgg

SEQ ID NO: 1456 - DNA, 23 bp, Homo sapiens
  source 1..23: mol_type = genomic DNA
gcagctgagagcctgcctggagg

SEQ ID NO: 1457 - DNA, 23 bp, Homo sapiens
  source 1..23: mol_type = genomic DNA
gcaggacgcctaagacggcaagg

SEQ ID NO: 1458 - DNA, 23 bp, Homo sapiens
  source 1..23: mol_type = genomic DNA
gcaggacgcctacgaaggcaagg

SEQ ID NO: 1459 - DNA, 23 bp, Homo sapiens
  source 1..23: mol_type = genomic DNA
gcaggaggggccagagtattggg

SEQ ID NO: 1460 - DNA, 23 bp, Homo sapiens
  source 1..23: mol_type = genomic DNA
gcaggaggggccggagcattggg

SEQ ID NO: 1461 - DNA, 23 bp, Homo sapiens
  source 1..23: mol_type = genomic DNA
gcaggaggggccggagtactggg

SEQ ID NO: 1462 - DNA, 23 bp, Homo sapiens
  source 1..23: mol_type = genomic DNA
gcaggaggggccggagtattagg

SEQ ID NO: 1463 - DNA, 23 bp, Homo sapiens
  source 1..23: mol_type = genomic DNA
gcaggaggggccggagtgttggg

SEQ ID NO: 1464 - DNA, 23 bp, Homo sapiens
  source 1..23: mol_type = genomic DNA
gcaggaggggctggagtattggg

SEQ ID NO: 1465 - DNA, 23 bp, Homo sapiens
  source 1..23: mol_type = genomic DNA
gcaggaggtgccggaggattggg

SEQ ID NO: 1466 - DNA, 23 bp, Homo sapiens
  source 1..23: mol_type = genomic DNA
gcaggatccgcaggctctctcgg

SEQ ID NO: 1467 - DNA, 23 bp, Homo sapiens
  source 1..23: mol_type = genomic DNA
gcaggcgccgtgggtggagcagg

SEQ ID NO: 1468 - DNA, 23 bp, Homo sapiens
  source 1..23: mol_type = genomic DNA
gcagggccatgtgattttagggg

SEQ ID NO: 1469 - DNA, 23 bp, Homo sapiens
  source 1..23: mol_type = genomic DNA
gcaggggggtggtggggcagagg

SEQ ID NO: 1470 - DNA, 23 bp, Homo sapiens
  source 1..23: mol_type = genomic DNA
gcaggtcgcctacgacggcaagg

SEQ ID NO: 1471 - DNA, 23 bp, Homo sapiens
  source 1..23: mol_type = genomic DNA
gcaggttccgcaggcccactcgg

SEQ ID NO: 1472 - DNA, 23 bp, Homo sapiens
  source 1..23: mol_type = genomic DNA
gcaggttccgcaggtcctctcgg

SEQ ID NO: 1473 - DNA, 23 bp, Homo sapiens
  source 1..23: mol_type = genomic DNA
gcaggtttcgcaggctctctcgg

SEQ ID NO: 1474 - DNA, 23 bp, Homo sapiens
  source 1..23: mol_type = genomic DNA
gcagtatgcctacgacggcaagg

SEQ ID NO: 1475 - DNA, 23 bp, Homo sapiens
  source 1..23: mol_type = genomic DNA
gcagtgcagagcctacctggagg

SEQ ID NO: 1476 - DNA, 23 bp, Homo sapiens
  source 1..23: mol_type = genomic DNA
gcagtggagagcccacctggagg

SEQ ID NO: 1477 - DNA, 23 bp, Homo sapiens
  source 1..23: mol_type = genomic DNA
gcagtggagagtctacctggagg

SEQ ID NO: 1478 - DNA, 23 bp, Homo sapiens
  source 1..23: mol_type = genomic DNA
gcagtggtcgaagtggtcaaagg

SEQ ID NO: 1479 - DNA, 23 bp, Homo sapiens
  source 1..23: mol_type = genomic DNA
gcagttgaaagcctacctggagg

SEQ ID NO: 1480 - DNA, 23 bp, Homo sapiens
  source 1..23: mol_type = genomic DNA
gcagttgccgcaggttcactcgg

SEQ ID NO: 1481 - DNA, 23 bp, Homo sapiens
  source 1..23: mol_type = genomic DNA
gcagtttccgcaggctcactcgg

SEQ ID NO: 1482 - DNA, 23 bp, Homo sapiens
  source 1..23: mol_type = genomic DNA
gcagtttccgcaggttcattcgg

SEQ ID NO: 1483 - DNA, 23 bp, Homo sapiens
  source 1..23: mol_type = genomic DNA
gcatctccttcccgttctccagg

SEQ ID NO: 1484 - DNA, 23 bp, Homo sapiens
  source 1..23: mol_type = genomic DNA
gcatgtacggctgcgacctgggg

SEQ ID NO: 1485 - DNA, 23 bp, Homo sapiens
  source 1..23: mol_type = genomic DNA
gcatgtatggctgcgacgtgggg

SEQ ID NO: 1486 - DNA, 23 bp, Homo sapiens
  source 1..23: mol_type = genomic DNA
gcatgtgtctgtgttggtgtagg

SEQ ID NO: 1487 - DNA, 23 bp, Homo sapiens
  source 1..23: mol_type = genomic DNA
gccacgtcccggcccggccgcgg

SEQ ID NO: 1488 - DNA, 23 bp, Homo sapiens
  source 1..23: mol_type = genomic DNA
gccatgacccggcccggccgcgg

SEQ ID NO: 1489 - DNA, 23 bp, Homo sapiens
  source 1..23: mol_type = genomic DNA
gccatgtcccggcccggccgtgg

SEQ ID NO: 1490 - DNA, 23 bp, Homo sapiens
  source 1..23: mol_type = genomic DNA
gccatgtcccggcccggctgcgg

SEQ ID NO: 1491 - DNA, 23 bp, Homo sapiens
  source 1..23: mol_type = genomic DNA
gcccatggcccagcacctcaggg

SEQ ID NO: 1492 - DNA, 23 bp, Homo sapiens
  source 1..23: mol_type = genomic DNA
gcccgacccacctcccggcgcgg

SEQ ID NO: 1493 - DNA, 23 bp, Homo sapiens
  source 1..23: mol_type = genomic DNA
gcccgaccctcctaccggcgcgg

SEQ ID NO: 1494 - DNA, 23 bp, Homo sapiens
  source 1..23: mol_type = genomic DNA
gcccgcaggagacgttggacagg

SEQ ID NO: 1495 - DNA, 23 bp, Homo sapiens
  source 1..23: mol_type = genomic DNA
gcccggccccgaccaaccagggg

SEQ ID NO: 1496 - DNA, 23 bp, Homo sapiens
  source 1..23: mol_type = genomic DNA
gcccgggatggcctcccacgagg

SEQ ID NO: 1497 - DNA, 23 bp, Homo sapiens
  source 1..23: mol_type = genomic DNA
gcccgtccgtggggaatgagggg

SEQ ID NO: 1498 - DNA, 23 bp, Homo sapiens
  source 1..23: mol_type = genomic DNA
gccctcccttgaatggaaaatgg

SEQ ID NO: 1499 - DNA, 23 bp, Homo sapiens
  source 1..23: mol_type = genomic DNA
gccctgaccgagacctgggcggg

SEQ ID NO: 1500 - DNA, 23 bp, Homo sapiens
  source 1..23: mol_type = genomic DNA
gccgcgccgggaggtgggtcggg

SEQ ID NO: 1501 - DNA, 23 bp, Homo sapiens
  source 1..23: mol_type = genomic DNA
gccgcgccggtaggagggtcggg

SEQ ID NO: 1502 - DNA, 23 bp, Homo sapiens
  source 1..23: mol_type = genomic DNA
gccgcgggcgccgtgggtggagg

SEQ ID NO: 1503 - DNA, 23 bp, Homo sapiens
  source 1..23: mol_type = genomic DNA
gccggacggagtattgggaccgg

SEQ ID NO: 1504 - DNA, 23 bp, Homo sapiens
  source 1..23: mol_type = genomic DNA
gccgtacgtcggggttggggagg

SEQ ID NO: 1505 - DNA, 23 bp, Homo sapiens
  source 1..23: mol_type = genomic DNA
gccgtgggtggaggaggggccgg

SEQ ID NO: 1506 - DNA, 23 bp, Homo sapiens
  source 1..23: mol_type = genomic DNA
gccgtgtcccggccaggccgcgg

SEQ ID NO: 1507 - DNA, 23 bp, Homo sapiens
  source 1..23: mol_type = genomic DNA
gccgtgtcccggcctggccgcgg

SEQ ID NO: 1508 - DNA, 23 bp, Homo sapiens
  source 1..23: mol_type = genomic DNA
gccgtgtccgccaggagctcagg

SEQ ID NO: 1509 - DNA, 23 bp, Homo sapiens
  source 1..23: mol_type = genomic DNA
gccgtgtccgggcccggccgcgg

SEQ ID NO: 1510 - DNA, 23 bp, Homo sapiens
  source 1..23: mol_type = genomic DNA
gccgtgtcctggcccggccgcgg

SEQ ID NO: 1511 - DNA, 23 bp, Homo sapiens
  source 1..23: mol_type = genomic DNA
gcctaaactgaaaacgaaaccgg

SEQ ID NO: 1512 - DNA, 23 bp, Homo sapiens
  source 1..23: mol_type = genomic DNA
gcctcctccgcgggtatgaccgg

SEQ ID NO: 1513 - DNA, 23 bp, Homo sapiens
  source 1..23: mol_type = genomic DNA
gcctctatggagaggagcgaggg

SEQ ID NO: 1514 - DNA, 23 bp, Homo sapiens
  source 1..23: mol_type = genomic DNA
gcctctgcggagaggagggaggg

SEQ ID NO: 1515 - DNA, 23 bp, Homo sapiens
  source 1..23: mol_type = genomic DNA
gcctctgctgagaggagcgaggg

SEQ ID NO: 1516 - DNA, 23 bp, Homo sapiens
  source 1..23: mol_type = genomic DNA
gcctgcgtccgctggtgtctggg

SEQ ID NO: 1517 - DNA, 23 bp, Homo sapiens
  source 1..23: mol_type = genomic DNA
gcgaccccgcgagtccgagaggg

SEQ ID NO: 1518 - DNA, 23 bp, Homo sapiens
  source 1..23: mol_type = genomic DNA
gcgaccccggccgtacgtggggg

SEQ ID NO: 1519 - DNA, 23 bp, Homo sapiens
  source 1..23: mol_type = genomic DNA
gcgacgccgcaagtccgagaggg

SEQ ID NO: 1520 - DNA, 23 bp, Homo sapiens
  source 1..23: mol_type = genomic DNA
gcgacgccgcgagtccgagaagg

SEQ ID NO: 1521 - DNA, 23 bp, Homo sapiens
  source 1..23: mol_type = genomic DNA
gcgacgccgcgagtccgaggggg

SEQ ID NO: 1522 - DNA, 23 bp, Homo sapiens
  source 1..23: mol_type = genomic DNA
gcgactccgcgagtccaagaggg

SEQ ID NO: 1523 - DNA, 23 bp, Homo sapiens
  source 1..23: mol_type = genomic DNA
gcgagaccggtgagtgaccccgg

SEQ ID NO: 1524 - DNA, 23 bp, Homo sapiens
  source 1..23: mol_type = genomic DNA
gcgaggaccgtgagtgaccccgg

SEQ ID NO: 1525 - DNA, 23 bp, Homo sapiens
  source 1..23: mol_type = genomic DNA
gcgatcagggaggcgccctgtgg

SEQ ID NO: 1526 - DNA, 23 bp, Homo sapiens
  source 1..23: mol_type = genomic DNA
gcgcaagtgggaggcggcccggg

SEQ ID NO: 1527 - DNA, 23 bp, Homo sapiens
  source 1..23: mol_type = genomic DNA
gcgcccgcggctccatcctttgg

SEQ ID NO: 1528 - DNA, 23 bp, Homo sapiens
  source 1..23: mol_type = genomic DNA
gcgcccgcggctccccttctcgg

SEQ ID NO: 1529 - DNA, 23 bp, Homo sapiens
  source 1..23: mol_type = genomic DNA
gcgccctggatagagcaggaggg

SEQ ID NO: 1530 - DNA, 23 bp, Homo sapiens
  source 1..23: mol_type = genomic DNA
gcgccgggaggtgggtcgggcgg

SEQ ID NO: 1531 - DNA, 23 bp, Homo sapiens
  source 1..23: mol_type = genomic DNA
gcgccggtaggagggtcgggcgg

SEQ ID NO: 1532 - DNA, 23 bp, Homo sapiens
  source 1..23: mol_type = genomic DNA
gcgccgtgggtggagaaggaggg

SEQ ID NO: 1533 - DNA, 23 bp, Homo sapiens
  source 1..23: mol_type = genomic DNA
gcgcgatccgcagtttctctcgg

SEQ ID NO: 1534 - DNA, 23 bp, Homo sapiens
  source 1..23: mol_type = genomic DNA
gcgcgatcctcaggttctctcgg

SEQ ID NO: 1535 - DNA, 23 bp, Homo sapiens
  source 1..23: mol_type = genomic DNA
gcgcgcgggtaccggggcagtgg

SEQ ID NO: 1536 - DNA, 23 bp, Homo sapiens
  source 1..23: mol_type = genomic DNA
gcgcggctacaaccagagcgagg

SEQ ID NO: 1537 - DNA, 23 bp, Homo sapiens
  source 1..23: mol_type = genomic DNA
gcgcgggtaccaagggcagtggg

SEQ ID NO: 1538 - DNA, 23 bp, Homo sapiens
  source 1..23: mol_type = genomic DNA
gcgcgggtaccaggggccacagg

SEQ ID NO: 1539 - DNA, 23 bp, Homo sapiens
  source 1..23: mol_type = genomic DNA
gcgcgggtaccggggcagtgggg

SEQ ID NO: 1540 - DNA, 23 bp, Homo sapiens
  source 1..23: mol_type = genomic DNA
gcgcggtgcgcaggctctctcgg

SEQ ID NO: 1541 - DNA, 23 bp, Homo sapiens
  source 1..23: mol_type = genomic DNA
gcgcggtggatagagcaggaggg

SEQ ID NO: 1542 - DNA, 23 bp, Homo sapiens
  source 1..23: mol_type = genomic DNA
gcgctgagtgatctgagccgcgg

SEQ ID NO: 1543 - DNA, 23 bp, Homo sapiens
  source 1..23: mol_type = genomic DNA
gcgctgggtaatctgagccgcgg

SEQ ID NO: 1544 - DNA, 23 bp, Homo sapiens
  source 1..23: mol_type = genomic DNA
gcgctgggtgatctaagccgcgg

SEQ ID NO: 1545 - DNA, 23 bp, Homo sapiens
  source 1..23: mol_type = genomic DNA
gcggagtctcccacttgcgctgg

SEQ ID NO: 1546 - DNA, 23 bp, Homo sapiens
  source 1..23: mol_type = genomic DNA
gcggagttggggaatctccaagg

SEQ ID NO: 1547 - DNA, 23 bp, Homo sapiens
  source 1..23: mol_type = genomic DNA
gcggatgtatggctgcgacctgg

SEQ ID NO: 1548 - DNA, 23 bp, Homo sapiens
  source 1..23: mol_type = genomic DNA
gcggccaggccgggacacggagg

SEQ ID NO: 1549 - DNA, 23 bp, Homo sapiens
  source 1..23: mol_type = genomic DNA
gcggccaggccgggacacggcgg

SEQ ID NO: 1550 - DNA, 23 bp, Homo sapiens
  source 1..23: mol_type = genomic DNA
gcggccgggccaggacacggcgg

SEQ ID NO: 1551 - DNA, 23 bp, Homo sapiens
  source 1..23: mol_type = genomic DNA
gcggccgggcccggacacggcgg

SEQ ID NO: 1552 - DNA, 23 bp, Homo sapiens
  source 1..23: mol_type = genomic DNA
gcggccgggccgggacatagcgg

SEQ ID NO: 1553 - DNA, 23 bp, Homo sapiens
  source 1..23: mol_type = genomic DNA
gcggccgggccgggacgtggcgg

SEQ ID NO: 1554 - DNA, 23 bp, Homo sapiens
  source 1..23: mol_type = genomic DNA
gcggccgggccgggtcatggcgg

SEQ ID NO: 1555 - DNA, 23 bp, Homo sapiens
  source 1..23: mol_type = genomic DNA
gcggcctggccgggacacggcgg

SEQ ID NO: 1556 - DNA, 23 bp, Homo sapiens
  source 1..23: mol_type = genomic DNA
gcggcgcagggaggagggtcggg

SEQ ID NO: 1557 - DNA, 23 bp, Homo sapiens
  source 1..23: mol_type = genomic DNA
gcggcgcagggaggtgggtcggg

SEQ ID NO: 1558 - DNA, 23 bp, Homo sapiens
  source 1..23: mol_type = genomic DNA
gcgggagccgtggatggagcagg

SEQ ID NO: 1559 - DNA, 23 bp, Homo sapiens
  source 1..23: mol_type = genomic DNA
gcgggcgccctggatagagcagg

SEQ ID NO: 1560 - DNA, 23 bp, Homo sapiens
  source 1..23: mol_type = genomic DNA
gcgggcgccgtgggtggagaagg

SEQ ID NO: 1561 - DNA, 23 bp, Homo sapiens
  source 1..23: mol_type = genomic DNA
gcgggcgccgtgggtggaggagg

SEQ ID NO: 1562 - DNA, 23 bp, Homo sapiens
  source 1..23: mol_type = genomic DNA
gcgggcgcggtggatagagcagg

SEQ ID NO: 1563 - DNA, 23 bp, Homo sapiens
  source 1..23: mol_type = genomic DNA
gcggggcggggccggggggacgg

SEQ ID NO: 1564 - DNA, 23 bp, Homo sapiens
  source 1..23: mol_type = genomic DNA
gcggggcggggcggggccggggg

SEQ ID NO: 1565 - DNA, 23 bp, Homo sapiens
  source 1..23: mol_type = genomic DNA
gcgggtgagtgcgggtcggcagg

SEQ ID NO: 1566 - DNA, 23 bp, Homo sapiens
  source 1..23: mol_type = genomic DNA
gcgtccagcgacagtgcccaggg

SEQ ID NO: 1567 - DNA, 23 bp, Homo sapiens
  source 1..23: mol_type = genomic DNA
gcgtctccttaccgttctccagg

SEQ ID NO: 1568 - DNA, 23 bp, Homo sapiens
  source 1..23: mol_type = genomic DNA
gcgtctccttcccattctccagg

SEQ ID NO: 1569 - DNA, 23 bp, Homo sapiens
  source 1..23: mol_type = genomic DNA
gcgtctccttccctttctccagg

SEQ ID NO: 1570 - DNA, 23 bp, Homo sapiens
  source 1..23: mol_type = genomic DNA
gcgtctccttccctttcttcagg

SEQ ID NO: 1571 - DNA, 23 bp, Homo sapiens
  source 1..23: mol_type = genomic DNA
gcgtctccttccggttctccagg

SEQ ID NO: 1572 - DNA, 23 bp, Homo sapiens
  source 1..23: mol_type = genomic DNA
gcgtctccttcctgttctccagg

SEQ ID NO: 1573 - DNA, 23 bp, Homo sapiens
  source 1..23: mol_type = genomic DNA
gcgtctctgaggaaatggagggg

SEQ ID NO: 1574 - DNA, 23 bp, Homo sapiens
  source 1..23: mol_type = genomic DNA
gcgtctctttcccgttctccagg

SEQ ID NO: 1575 - DNA, 23 bp, Homo sapiens
  source 1..23: mol_type = genomic DNA
gcgtcttcttcccgttccccagg

SEQ ID NO: 1576 - DNA, 23 bp, Homo sapiens
  source 1..23: mol_type = genomic DNA
gcgttttgggggcgtctctcagg

SEQ ID NO: 1577 - DNA, 23 bp, Homo sapiens
  source 1..23: mol_type = genomic DNA
gctacgccgcgagtccaagaggg

SEQ ID NO: 1578 - DNA, 23 bp, Homo sapiens
  source 1..23: mol_type = genomic DNA
gctatgtcccggcccggccgcgg

SEQ ID NO: 1579 - DNA, 23 bp, Homo sapiens
  source 1..23: mol_type = genomic DNA
gctcaggtagggaaggggtgggg

SEQ ID NO: 1580 - DNA, 23 bp, Homo sapiens
  source 1..23: mol_type = genomic DNA
gctcccctctcggactcgcgggg

SEQ ID NO: 1581 - DNA, 23 bp, Homo sapiens
  source 1..23: mol_type = genomic DNA
gctctctgcggtcgaggttctgg

SEQ ID NO: 1582 - DNA, 23 bp, Homo sapiens
  source 1..23: mol_type = genomic DNA
gctgaggggctcagaagtgctgg

SEQ ID NO: 1583 - DNA, 23 bp, Homo sapiens
  source 1..23: mol_type = genomic DNA
gctgcaacctggggcccgacggg

SEQ ID NO: 1584 - DNA, 23 bp, Homo sapiens
  source 1..23: mol_type = genomic DNA
gctgcaacgcgcgggtaccaggg

SEQ ID NO: 1585 - DNA, 23 bp, Homo sapiens
  source 1..23: mol_type = genomic DNA
gctgcagagcgcgggtaccaggg

SEQ ID NO: 1586 - DNA, 23 bp, Homo sapiens
  source 1..23: mol_type = genomic DNA
gctgcagcacgcgggtaccaggg

SEQ ID NO: 1587 - DNA, 23 bp, Homo sapiens
  source 1..23: mol_type = genomic DNA
gctgcagcgcacaggtaccaggg

SEQ ID NO: 1588 - DNA, 23 bp, Homo sapiens
  source 1..23: mol_type = genomic DNA
gctgcagcgcacgagtaccaggg

SEQ ID NO: 1589 - DNA, 23 bp, Homo sapiens
  source 1..23: mol_type = genomic DNA
gctgcagcgcactggtaccaggg

SEQ ID NO: 1590 - DNA, 23 bp, Homo sapiens
  source 1..23: mol_type = genomic DNA
gctgcagcgcgcgggtaccaagg

SEQ ID NO: 1591 - DNA, 23 bp, Homo sapiens
  source 1..23: mol_type = genomic DNA
gctgcagcgcgcgggtaccgggg

SEQ ID NO: 1592 - DNA, 23 bp, Homo sapiens
  source 1..23: mol_type = genomic DNA
gctgcgacatggggccggacggg

SEQ ID NO: 1593 - DNA, 23 bp, Homo sapiens
  source 1..23: mol_type = genomic DNA
gctgcgacccggggcccgacggg

SEQ ID NO: 1594 - DNA, 23 bp, Homo sapiens
  source 1..23: mol_type = genomic DNA
gctgcgacctggggcccgaccgg

SEQ ID NO: 1595 - DNA, 23 bp, Homo sapiens
  source 1..23: mol_type = genomic DNA
gctgcgacctggggccctacggg

SEQ ID NO: 1596 - DNA, 23 bp, Homo sapiens
  source 1..23: mol_type = genomic DNA
gctgcgacctggggctcgacggg

SEQ ID NO: 1597 - DNA, 23 bp, Homo sapiens
  source 1..23: mol_type = genomic DNA
gctgcgacctgggtcccgacggg

SEQ ID NO: 1598 - DNA, 23 bp, Homo sapiens
  source 1..23: mol_type = genomic DNA
gctgcgaccttgggcccgacggg

SEQ ID NO: 1599 - DNA, 23 bp, Homo sapiens
  source 1..23: mol_type = genomic DNA
gctgcgacgtggagccggacggg

SEQ ID NO: 1600 - DNA, 23 bp, Homo sapiens
  source 1..23: mol_type = genomic DNA
gctgcgacgtggggcccggcggg

SEQ ID NO: 1601 - DNA, 23 bp, Homo sapiens
  source 1..23: mol_type = genomic DNA
gctgcgacgtggggccggatggg

SEQ ID NO: 1602 - DNA, 23 bp, Homo sapiens
  source 1..23: mol_type = genomic DNA
gctgggacctggggcccgacggg

SEQ ID NO: 1603 - DNA, 23 bp, Homo sapiens
  source 1..23: mol_type = genomic DNA
gctgggcggggctcgggggctgg

SEQ ID NO: 1604 - DNA, 23 bp, Homo sapiens
  source 1..23: mol_type = genomic DNA
gctgggctgaccgcggggtcggg

SEQ ID NO: 1605 - DNA, 23 bp, Homo sapiens
  source 1..23: mol_type = genomic DNA
gcttgtaaggtgagattctgggg

SEQ ID NO: 1606 - DNA, 23 bp, Homo sapiens
  source 1..23: mol_type = genomic DNA
gcttgtacggctgcgacgtgggg

SEQ ID NO: 1607 - DNA, 23 bp, Homo sapiens
  source 1..23: mol_type = genomic DNA
gcttgtacttctgcgtctcccgg

SEQ ID NO: 1608 - DNA, 23 bp, Homo sapiens
  source 1..23: mol_type = genomic DNA
gcttgtacttttgtgtctcccgg

SEQ ID NO: 1609 - DNA, 23 bp, Homo sapiens
  source 1..23: mol_type = genomic DNA
gcttgtgcttctgtgtctcccgg

SEQ ID NO: 1610 - DNA, 23 bp, Homo sapiens
  source 1..23: mol_type = genomic DNA
gcttgttcttctgtgtctcccgg

SEQ ID NO: 1611 - DNA, 23 bp, Homo sapiens
  source 1..23: mol_type = genomic DNA
ggaaccccgcttcatcgccgtgg

SEQ ID NO: 1612 - DNA, 23 bp, Homo sapiens
  source 1..23: mol_type = genomic DNA
ggaacgcagatcctcgttcaggg

SEQ ID NO: 1613 - DNA, 23 bp, Homo sapiens
  source 1..23: mol_type = genomic DNA
ggaagaaggaccccacaagttgg

SEQ ID NO: 1614 - DNA, 23 bp, Homo sapiens
  source 1..23: mol_type = genomic DNA
ggaagacggctctgggaaaaggg

SEQ ID NO: 1615 - DNA, 23 bp, Homo sapiens
  source 1..23: mol_type = genomic DNA
ggaagagttctggtagggaaggg

SEQ ID NO: 1616 - DNA, 23 bp, Homo sapiens
  source 1..23: mol_type = genomic DNA
ggaagatggctcccatctcaggg

SEQ ID NO: 1617 - DNA, 23 bp, Homo sapiens
  source 1..23: mol_type = genomic DNA
ggaagcctgggggcgaggagggg

SEQ ID NO: 1618 - DNA, 23 bp, Homo sapiens
  source 1..23: mol_type = genomic DNA
ggaaggagacgctgcagcgaagg

SEQ ID NO: 1619 - DNA, 23 bp, Homo sapiens
  source 1..23: mol_type = genomic DNA
ggaaggagccgcgggcgccctgg

SEQ ID NO: 1620 - DNA, 23 bp, Homo sapiens
  source 1..23: mol_type = genomic DNA
ggaaggagccgcgggcgccgtgg

SEQ ID NO: 1621 - DNA, 23 bp, Homo sapiens
  source 1..23: mol_type = genomic DNA
ggaaggctccccactgcccttgg

SEQ ID NO: 1622 - DNA, 23 bp, Homo sapiens
  source 1..23: mol_type = genomic DNA
ggaaggttccatcccctggcagg

SEQ ID NO: 1623 - DNA, 23 bp, Homo sapiens
  source 1..23: mol_type = genomic DNA
ggacaagaggaattatggggcgg

SEQ ID NO: 1624 - DNA, 23 bp, Homo sapiens
  source 1..23: mol_type = genomic DNA
ggacacctgatcagtattctagg

SEQ ID NO: 1625 - DNA, 23 bp, Homo sapiens
  source 1..23: mol_type = genomic DNA
ggacatttgcttcccacaggtgg

SEQ ID NO: 1626 - DNA, 23 bp, Homo sapiens
  source 1..23: mol_type = genomic DNA
ggaccaggagactgaccgagtgg

SEQ ID NO: 1627 - DNA, 23 bp, Homo sapiens
  source 1..23: mol_type = genomic DNA
ggacccctgatcagtattatagg

SEQ ID NO: 1628 - DNA, 23 bp, Homo sapiens
  source 1..23: mol_type = genomic DNA
ggaccctcagagtcactctctgg

SEQ ID NO: 1629 - DNA, 23 bp, Homo sapiens
  source 1..23: mol_type = genomic DNA
ggacctaagctcctggaccgcgg

SEQ ID NO: 1630 - DNA, 23 bp, Homo sapiens
  source 1..23: mol_type = genomic DNA
ggacctgagctcccggaccgcgg

SEQ ID NO: 1631 - DNA, 23 bp, Homo sapiens
  source 1..23: mol_type = genomic DNA
ggacctgagctcctggatcgcgg

SEQ ID NO: 1632 - DNA, 23 bp, Homo sapiens
  source 1..23: mol_type = genomic DNA
ggacctgcgctcttagaccgcgg

SEQ ID NO: 1633 - DNA, 23 bp, Homo sapiens
  source 1..23: mol_type = genomic DNA
ggacctgcgctctttgaccgcgg

SEQ ID NO: 1634 - DNA, 23 bp, Homo sapiens
  source 1..23: mol_type = genomic DNA
ggacctggtcaagagcccgcagg

SEQ ID NO: 1635 - DNA, 23 bp, Homo sapiens
  source 1..23: mol_type = genomic DNA
ggacggagccccgggagccatgg

SEQ ID NO: 1636 - DNA, 23 bp, Homo sapiens
  source 1..23: mol_type = genomic DNA
ggacggagccctgggcgccatgg

SEQ ID NO: 1637 - DNA, 23 bp, Homo sapiens
  source 1..23: mol_type = genomic DNA
ggacggatgtatcaccgtggtgg

SEQ ID NO: 1638 - DNA, 23 bp, Homo sapiens
  source 1..23: mol_type = genomic DNA
ggactccgagacccttgccccgg

SEQ ID NO: 1639 - DNA, 23 bp, Homo sapiens
  source 1..23: mol_type = genomic DNA
ggactctccgcggccgggccggg

SEQ ID NO: 1640 - DNA, 23 bp, Homo sapiens
  source 1..23: mol_type = genomic DNA
ggacttcagaaccggtactgcgg

SEQ ID NO: 1641 - DNA, 23 bp, Homo sapiens
  source 1..23: mol_type = genomic DNA
ggactttagaacctggactgcgg

SEQ ID NO: 1642 - DNA, 23 bp, Homo sapiens
  source 1..23: mol_type = genomic DNA
ggagaaacacctcatggagtggg

SEQ ID NO: 1643 - DNA, 23 bp, Homo sapiens
  source 1..23: mol_type = genomic DNA
ggagaaatacgtcatggagtggg

SEQ ID NO: 1644 - DNA, 23 bp, Homo sapiens
  source 1..23: mol_type = genomic DNA
ggagaacgggaaggagacgctgg

SEQ ID NO: 1645 - DNA, 23 bp, Homo sapiens
  source 1..23: mol_type = genomic DNA
ggagaagaagtgaaactcttggg

SEQ ID NO: 1646 - DNA, 23 bp, Homo sapiens
  source 1..23: mol_type = genomic DNA
ggagacccgggccgtacgtcggg

SEQ ID NO: 1647 - DNA, 23 bp, Homo sapiens
  source 1..23: mol_type = genomic DNA
ggagacgcccgtcgggccccagg

SEQ ID NO: 1648 - DNA, 23 bp, Homo sapiens
  source 1..23: mol_type = genomic DNA
ggagactgaccgagtggacctgg

SEQ ID NO: 1649 - DNA, 23 bp, Homo sapiens
  source 1..23: mol_type = genomic DNA
ggagagggagcctgggggcgagg

SEQ ID NO: 1650 - DNA, 23 bp, Homo sapiens
  source 1..23: mol_type = genomic DNA
ggagatgtagaaatacctcatgg

SEQ ID NO: 1651 - DNA, 23 bp, Homo sapiens
  source 1..23: mol_type = genomic DNA
ggagcaacggagagcctacctgg

SEQ ID NO: 1652 - DNA, 23 bp, Homo sapiens
  source 1..23: mol_type = genomic DNA
ggagcagcggagaacctacctgg

SEQ ID NO: 1653 - DNA, 23 bp, Homo sapiens
  source 1..23: mol_type = genomic DNA
ggagcagctaagagcctacctgg

SEQ ID NO: 1654 - DNA, 23 bp, Homo sapiens
  source 1..23: mol_type = genomic DNA
ggagcagctgagagcctaccggg

SEQ ID NO: 1655 - DNA, 23 bp, Homo sapiens
  source 1..23: mol_type = genomic DNA
ggagcagctgagagcctgcctgg

SEQ ID NO: 1656 - DNA, 23 bp, Homo sapiens
  source 1..23: mol_type = genomic DNA
ggagcagtgcagagcctacctgg

SEQ ID NO: 1657 - DNA, 23 bp, Homo sapiens
  source 1..23: mol_type = genomic DNA
ggagcagtggagagcccacctgg

SEQ ID NO: 1658 - DNA, 23 bp, Homo sapiens
  source 1..23: mol_type = genomic DNA
ggagcagtggagagtctacctgg

SEQ ID NO: 1659 - DNA, 23 bp, Homo sapiens
  source 1..23: mol_type = genomic DNA
ggagcagttgaaagcctacctgg

SEQ ID NO: 1660 - DNA, 23 bp, Homo sapiens
  source 1..23: mol_type = genomic DNA
ggagccatggatagagcaggagg

SEQ ID NO: 1661 - DNA, 23 bp, Homo sapiens
  source 1..23: mol_type = genomic DNA
ggagccccgcggcttcggggtgg

SEQ ID NO: 1662 - DNA, 23 bp, Homo sapiens
  source 1..23: mol_type = genomic DNA
ggagccccgcttcatcgctgtgg

SEQ ID NO: 1663 - DNA, 23 bp, Homo sapiens
  source 1..23: mol_type = genomic DNA
ggagccccgcttcattaccgtgg

SEQ ID NO: 1664 - DNA, 23 bp, Homo sapiens
  source 1..23: mol_type = genomic DNA
ggagccctgcttcatcgccgtgg

SEQ ID NO: 1665 - DNA, 23 bp, Homo sapiens
  source 1..23: mol_type = genomic DNA
ggagcccttcagcagggtcgggg

SEQ ID NO: 1666 - DNA, 23 bp, Homo sapiens
  source 1..23: mol_type = genomic DNA
ggagccgcaggcgccgtgggtgg

SEQ ID NO: 1667 - DNA, 23 bp, Homo sapiens
  source 1..23: mol_type = genomic DNA
ggagccgcgggagccgtggatgg

SEQ ID NO: 1668 - DNA, 23 bp, Homo sapiens
  source 1..23: mol_type = genomic DNA
ggagccgtggatggagcaggagg

SEQ ID NO: 1669 - DNA, 23 bp, Homo sapiens
  source 1..23: mol_type = genomic DNA
ggagcctgggggcgaggagtggg

SEQ ID NO: 1670 - DNA, 23 bp, Homo sapiens
  source 1..23: mol_type = genomic DNA
ggagcgcaggtcctcgtccaggg

SEQ ID NO: 1671 - DNA, 23 bp, Homo sapiens
  source 1..23: mol_type = genomic DNA
ggagcgcaggtcctcgttcacgg

SEQ ID NO: 1672 - DNA, 23 bp, Homo sapiens
  source 1..23: mol_type = genomic DNA
ggagctcaggtcctcgttcaagg

SEQ ID NO: 1673 - DNA, 23 bp, Homo sapiens
  source 1..23: mol_type = genomic DNA
ggagctccgcttcatcgcagtgg

SEQ ID NO: 1674 - DNA, 23 bp, Homo sapiens
  source 1..23: mol_type = genomic DNA
ggagcttaggtcctcgttcaggg

SEQ ID NO: 1675 - DNA, 23 bp, Homo sapiens
  source 1..23: mol_type = genomic DNA
ggaggactagacccaggacacgg

SEQ ID NO: 1676 - DNA, 23 bp, Homo sapiens
  source 1..23: mol_type = genomic DNA
ggaggaggggccggagtattggg

SEQ ID NO: 1677 - DNA, 23 bp, Homo sapiens
  source 1..23: mol_type = genomic DNA
ggaggcgcccgtagggccccagg

SEQ ID NO: 1678 - DNA, 23 bp, Homo sapiens
  source 1..23: mol_type = genomic DNA
ggaggcgcccgtcgagccccagg

SEQ ID NO: 1679 - DNA, 23 bp, Homo sapiens
  source 1..23: mol_type = genomic DNA
ggaggcgcccgtcgggacccagg

SEQ ID NO: 1680 - DNA, 23 bp, Homo sapiens
  source 1..23: mol_type = genomic DNA
ggaggcgcccgtcgggcccaagg

SEQ ID NO: 1681 - DNA, 23 bp, Homo sapiens
  source 1..23: mol_type = genomic DNA
ggaggcgcccgtcgggccccggg

SEQ ID NO: 1682 - DNA, 23 bp, Homo sapiens
  source 1..23: mol_type = genomic DNA
ggaggcgccggtcgggccccagg

SEQ ID NO: 1683 - DNA, 23 bp, Homo sapiens
  source 1..23: mol_type = genomic DNA
ggagggcaggtcctcgttcaggg

SEQ ID NO: 1684 - DNA, 23 bp, Homo sapiens
  source 1..23: mol_type = genomic DNA
ggagggcgatattatagtgttgg

SEQ ID NO: 1685 - DNA, 23 bp, Homo sapiens
  source 1..23: mol_type = genomic DNA
ggaggggcccgtcgggccccagg

SEQ ID NO: 1686 - DNA, 23 bp, Homo sapiens
  source 1..23: mol_type = genomic DNA
ggaggggccggacggagtattgg

SEQ ID NO: 1687 - DNA, 23 bp, Homo sapiens
  source 1..23: mol_type = genomic DNA
ggagtaggagcctgggggcgagg

SEQ ID NO: 1688 - DNA, 23 bp, Homo sapiens
  source 1..23: mol_type = genomic DNA
ggagtcccgcggcttcggggcgg

SEQ ID NO: 1689 - DNA, 23 bp, Homo sapiens
  source 1..23: mol_type = genomic DNA
ggagtgagagcctggggaccagg

SEQ ID NO: 1690 - DNA, 23 bp, Homo sapiens
  source 1..23: mol_type = genomic DNA
ggagtggaagcctgggggcgagg

SEQ ID NO: 1691 - DNA, 23 bp, Homo sapiens
  source 1..23: mol_type = genomic DNA
ggagtggctccgcagatatctgg

SEQ ID NO: 1692 - DNA, 23 bp, Homo sapiens
  source 1..23: mol_type = genomic DNA
ggagtgggaacctgggggcgagg

SEQ ID NO: 1693 - DNA, 23 bp, Homo sapiens
  source 1..23: mol_type = genomic DNA
ggagtgggagactgggggcgagg

SEQ ID NO: 1694 - DNA, 23 bp, Homo sapiens
  source 1..23: mol_type = genomic DNA
ggagtgggagactgggggtgagg

SEQ ID NO: 1695 - DNA, 23 bp, Homo sapiens
  source 1..23: mol_type = genomic DNA
ggagtgggagcctgggagcgagg

SEQ ID NO: 1696 - DNA, 23 bp, Homo sapiens
  source 1..23: mol_type = genomic DNA
ggagtgggaggctgggggcgagg

SEQ ID NO: 1697 - DNA, 23 bp, Homo sapiens
  source 1..23: mol_type = genomic DNA
ggatagggaggaccagacccagg

SEQ ID NO: 1698 - DNA, 23 bp, Homo sapiens
  source 1..23: mol_type = genomic DNA
ggatctcggaccctgagactcgg

SEQ ID NO: 1699 - DNA, 23 bp, Homo sapiens
  source 1..23: mol_type = genomic DNA
ggatgacatcgccctgaacgagg

SEQ ID NO: 1700 - DNA, 23 bp, Homo sapiens
  source 1..23: mol_type = genomic DNA
ggatgacatctctgaggaaatgg

SEQ ID NO: 1701 - DNA, 23 bp, Homo sapiens
  source 1..23: mol_type = genomic DNA
ggatggagccccgggcgccatgg

SEQ ID NO: 1702 - DNA, 23 bp, Homo sapiens
  source 1..23: mol_type = genomic DNA
ggatggcaaggaccaaactcagg

SEQ ID NO: 1703 - DNA, 23 bp, Homo sapiens
  source 1..23: mol_type = genomic DNA
ggatggcctcccacgaggaaggg

SEQ ID NO: 1704 - DNA, 23 bp, Homo sapiens
  source 1..23: mol_type = genomic DNA
ggatggcgaggactaaactcagg

SEQ ID NO: 1705 - DNA, 23 bp, Homo sapiens
  source 1..23: mol_type = genomic DNA
ggatggcgccctgggcgccatgg

SEQ ID NO: 1706 - DNA, 23 bp, Homo sapiens
  source 1..23: mol_type = genomic DNA
ggatggcgtctctgaggaaatgg

SEQ ID NO: 1707 - DNA, 23 bp, Homo sapiens
  source 1..23: mol_type = genomic DNA
ggatggggaagaccagacccagg

SEQ ID NO: 1708 - DNA, 23 bp, Homo sapiens
  source 1..23: mol_type = genomic DNA
ggatggggaggaccaaattcagg

SEQ ID NO: 1709 - DNA, 23 bp, Homo sapiens
  source 1..23: mol_type = genomic DNA
ggatggggaggactagacccagg

SEQ ID NO: 1710 - DNA, 23 bp, Homo sapiens
  source 1..23: mol_type = genomic DNA
ggatgtaaagaaatacctcatgg

SEQ ID NO: 1711 - DNA, 23 bp, Homo sapiens
  source 1..23: mol_type = genomic DNA
ggatgtaaggctgcgacgtgggg

SEQ ID NO: 1712 - DNA, 23 bp, Homo sapiens
  source 1..23: mol_type = genomic DNA
ggatgtacggctgggacctgggg

SEQ ID NO: 1713 - DNA, 23 bp, Homo sapiens
  source 1..23: mol_type = genomic DNA
ggatgtatggttgcgacgtgggg

SEQ ID NO: 1714 - DNA, 23 bp, Homo sapiens
  source 1..23: mol_type = genomic DNA
ggatgtctggctgcgacccgggg

SEQ ID NO: 1715 - DNA, 23 bp, Homo sapiens
  source 1..23: mol_type = genomic DNA
ggatgtggagaaacacctcatgg

SEQ ID NO: 1716 - DNA, 23 bp, Homo sapiens
  source 1..23: mol_type = genomic DNA
ggatgtggagaaatacgtcatgg

SEQ ID NO: 1717 - DNA, 23 bp, Homo sapiens
  source 1..23: mol_type = genomic DNA
ggatgtgtagaaatacctcatgg

SEQ ID NO: 1718 - DNA, 23 bp, Homo sapiens
  source 1..23: mol_type = genomic DNA
ggatgtgtggctgcaacctgggg

SEQ ID NO: 1719 - DNA, 23 bp, Homo sapiens
  source 1..23: mol_type = genomic DNA
ggatgtttggctgcgaccttggg

SEQ ID NO: 1720 - DNA, 23 bp, Homo sapiens
  source 1..23: mol_type = genomic DNA
ggattacaacgccctgaatgagg

SEQ ID NO: 1721 - DNA, 23 bp, Homo sapiens
  source 1..23: mol_type = genomic DNA
ggattacatagccctgaacgagg

SEQ ID NO: 1722 - DNA, 23 bp, Homo sapiens
  source 1..23: mol_type = genomic DNA
ggattacatcgccctggacgagg

SEQ ID NO: 1723 - DNA, 23 bp, Homo sapiens
  source 1..23: mol_type = genomic DNA
ggattacatcgccgtgaacgagg

SEQ ID NO: 1724 - DNA, 23 bp, Homo sapiens
  source 1..23: mol_type = genomic DNA
ggcacctcctgctctatccatgg

SEQ ID NO: 1725 - DNA, 23 bp, Homo sapiens
  source 1..23: mol_type = genomic DNA
ggcagggccatgtgattttaggg

SEQ ID NO: 1726 - DNA, 23 bp, Homo sapiens
  source 1..23: mol_type = genomic DNA
ggcataatgtgaggagggtgggg

SEQ ID NO: 1727 - DNA, 23 bp, Homo sapiens
  source 1..23: mol_type = genomic DNA
ggccagccccggagatctacagg

SEQ ID NO: 1728 - DNA, 23 bp, Homo sapiens
  source 1..23: mol_type = genomic DNA
ggccagggtctcacatcatccgg

SEQ ID NO: 1729 - DNA, 23 bp, Homo sapiens
  source 1..23: mol_type = genomic DNA
ggccagggtctcacatccagagg

SEQ ID NO: 1730 - DNA, 23 bp, Homo sapiens
  source 1..23: mol_type = genomic DNA
ggccatcccgggcgatctatagg

SEQ ID NO: 1731 - DNA, 23 bp, Homo sapiens
  source 1..23: mol_type = genomic DNA
ggccatgggcttctaccctgcgg

SEQ ID NO: 1732 - DNA, 23 bp, Homo sapiens
  source 1..23: mol_type = genomic DNA
ggcccctcctgctccatccacgg

SEQ ID NO: 1733 - DNA, 23 bp, Homo sapiens
  source 1..23: mol_type = genomic DNA
ggcccctcctgctctatccaggg

SEQ ID NO: 1734 - DNA, 23 bp, Homo sapiens
  source 1..23: mol_type = genomic DNA
ggcccctccttctccacccacgg

SEQ ID NO: 1735 - DNA, 23 bp, Homo sapiens
  source 1..23: mol_type = genomic DNA
ggcccgtccgtggggaatgaggg

SEQ ID NO: 1736 - DNA, 23 bp, Homo sapiens
  source 1..23: mol_type = genomic DNA
ggccctgaccgagacctgggcgg

SEQ ID NO: 1737 - DNA, 23 bp, Homo sapiens
  source 1..23: mol_type = genomic DNA
ggccctgagcttctaccctgtgg

SEQ ID NO: 1738 - DNA, 23 bp, Homo sapiens
  source 1..23: mol_type = genomic DNA
ggccctgggcttctaccctgtgg

SEQ ID NO: 1739 - DNA, 23 bp, Homo sapiens
  source 1..23: mol_type = genomic DNA
ggccctgggtttctaccctgtgg

SEQ ID NO: 1740 - DNA, 23 bp, Homo sapiens
  source 1..23: mol_type = genomic DNA
ggccctgtgcttctaccctgcgg

SEQ ID NO: 1741 - DNA, 23 bp, Homo sapiens
  source 1..23: mol_type = genomic DNA
ggccgcctccaacttgggctggg

SEQ ID NO: 1742 - DNA, 23 bp, Homo sapiens
  source 1..23: mol_type = genomic DNA
ggccgcctccaacttgtgctggg

SEQ ID NO: 1743 - DNA, 23 bp, Homo sapiens
  source 1..23: mol_type = genomic DNA
ggccgcctcccacttacgctggg

SEQ ID NO: 1744 - DNA, 23 bp, Homo sapiens
  source 1..23: mol_type = genomic DNA
ggccgcctcccacttgcgctcgg

SEQ ID NO: 1745 - DNA, 23 bp, Homo sapiens
  source 1..23: mol_type = genomic DNA
ggccgcctcccacttgggctggg

SEQ ID NO: 1746 - DNA, 23 bp, Homo sapiens
  source 1..23: mol_type = genomic DNA
ggccgcctcccatttgcgctggg

SEQ ID NO: 1747 - DNA, 23 bp, Homo sapiens
  source 1..23: mol_type = genomic DNA
ggcctctatggagaggagcgagg

SEQ ID NO: 1748 - DNA, 23 bp, Homo sapiens
  source 1..23: mol_type = genomic DNA
ggcctctgcggagaggagggagg

SEQ ID NO: 1749 - DNA, 23 bp, Homo sapiens
  source 1..23: mol_type = genomic DNA
ggcctctgctgagaggagcgagg

SEQ ID NO: 1750 - DNA, 23 bp, Homo sapiens
  source 1..23: mol_type = genomic DNA
ggcgaccccggccgtacgtgggg

SEQ ID NO: 1751 - DNA, 23 bp, Homo sapiens
  source 1..23: mol_type = genomic DNA
ggcgcaggcctcatcccccacgg

SEQ ID NO: 1752 - DNA, 23 bp, Homo sapiens
  source 1..23: mol_type = genomic DNA
ggcgccatgacggccattctcgg

SEQ ID NO: 1753 - DNA, 23 bp, Homo sapiens
  source 1..23: mol_type = genomic DNA
ggcgccatgatggccatcctcgg

SEQ ID NO: 1754 - DNA, 23 bp, Homo sapiens
  source 1..23: mol_type = genomic DNA
ggcgcccagggcgccatcctcgg

SEQ ID NO: 1755 - DNA, 23 bp, Homo sapiens
  source 1..23: mol_type = genomic DNA
ggcgcccagggctccgtcctcgg

SEQ ID NO: 1756 - DNA, 23 bp, Homo sapiens
  source 1..23: mol_type = genomic DNA
ggcgcccgcggctcccccctcgg

SEQ ID NO: 1757 - DNA, 23 bp, Homo sapiens
  source 1..23: mol_type = genomic DNA
ggcgcccggggctccatcctcgg

SEQ ID NO: 1758 - DNA, 23 bp, Homo sapiens
  source 1..23: mol_type = genomic DNA
ggcgccctggatagagcaggagg

SEQ ID NO: 1759 - DNA, 23 bp, Homo sapiens
  source 1..23: mol_type = genomic DNA
ggcgccgtgggtggagaaggagg

SEQ ID NO: 1760 - DNA, 23 bp, Homo sapiens
  source 1..23: mol_type = genomic DNA
ggcgcctgcggctcccctcttgg

SEQ ID NO: 1761 - DNA, 23 bp, Homo sapiens
  source 1..23: mol_type = genomic DNA
ggcgcggtggatagagcaggagg

SEQ ID NO: 1762 - DNA, 23 bp, Homo sapiens
  source 1..23: mol_type = genomic DNA
ggcggcccgtatggcggagcagg

SEQ ID NO: 1763 - DNA, 23 bp, Homo sapiens
  source 1..23: mol_type = genomic DNA
ggcggggcggggcggggccgggg

SEQ ID NO: 1764 - DNA, 23 bp, Homo sapiens
  source 1..23: mol_type = genomic DNA
ggcggggggggggtggggtgggg

SEQ ID NO: 1765 - DNA, 23 bp, Homo sapiens
  source 1..23: mol_type = genomic DNA
ggcgggtctgggggggggggggg

SEQ ID NO: 1766 - DNA, 23 bp, Homo sapiens
  source 1..23: mol_type = genomic DNA
ggcggtgtagaaatacctcaagg

SEQ ID NO: 1767 - DNA, 23 bp, Homo sapiens
  source 1..23: mol_type = genomic DNA
ggcggtgtagaaatacttcatgg

SEQ ID NO: 1768 - DNA, 23 bp, Homo sapiens
  source 1..23: mol_type = genomic DNA
ggcgtctctgaggaaatggaggg

SEQ ID NO: 1769 - DNA, 23 bp, Homo sapiens
  source 1..23: mol_type = genomic DNA
ggctacaaccagagcgaggccgg

SEQ ID NO: 1770 - DNA, 23 bp, Homo sapiens
  source 1..23: mol_type = genomic DNA
ggctcccatctcagggtgagggg

SEQ ID NO: 1771 - DNA, 23 bp, Homo sapiens
  source 1..23: mol_type = genomic DNA
ggctcccctctcggactcgcggg

SEQ ID NO: 1772 - DNA, 23 bp, Homo sapiens
  source 1..23: mol_type = genomic DNA
ggctccccttctcggactcgcgg

SEQ ID NO: 1773 - DNA, 23 bp, Homo sapiens
  source 1..23: mol_type = genomic DNA
ggctcccggggctccgtcctcgg

SEQ ID NO: 1774 - DNA, 23 bp, Homo sapiens
  source 1..23: mol_type = genomic DNA
ggctccgagacccttgtcccggg

SEQ ID NO: 1775 - DNA, 23 bp, Homo sapiens
  source 1..23: mol_type = genomic DNA
ggctgatgcctgaggtcctttgg

SEQ ID NO: 1776 - DNA, 23 bp, Homo sapiens
  source 1..23: mol_type = genomic DNA
ggctgcaacctggggcccgacgg

SEQ ID NO: 1777 - DNA, 23 bp, Homo sapiens
  source 1..23: mol_type = genomic DNA
ggctgcctcccacttgcgctggg

SEQ ID NO: 1778 - DNA, 23 bp, Homo sapiens
  source 1..23: mol_type = genomic DNA
ggctgcgacatggggccggacgg

SEQ ID NO: 1779 - DNA, 23 bp, Homo sapiens
  source 1..23: mol_type = genomic DNA
ggctgcgacccggggcccgacgg

SEQ ID NO: 1780 - DNA, 23 bp, Homo sapiens
  source 1..23: mol_type = genomic DNA
ggctgcgacctgggcccgacggg

SEQ ID NO: 1781 - DNA, 23 bp, Homo sapiens
  source 1..23: mol_type = genomic DNA
ggctgcgacctggggccctacgg

SEQ ID NO: 1782 - DNA, 23 bp, Homo sapiens
  source 1..23: mol_type = genomic DNA
ggctgcgacctggggctcgacgg

SEQ ID NO: 1783 - DNA, 23 bp, Homo sapiens
  source 1..23: mol_type = genomic DNA
ggctgcgacctgggtcccgacgg

SEQ ID NO: 1784 - DNA, 23 bp, Homo sapiens
  source 1..23: mol_type = genomic DNA
ggctgcgaccttgggcccgacgg

SEQ ID NO: 1785 - DNA, 23 bp, Homo sapiens
  source 1..23: mol_type = genomic DNA
ggctgcgacgtggagccggacgg

SEQ ID NO: 1786 - DNA, 23 bp, Homo sapiens
  source 1..23: mol_type = genomic DNA
ggctgcgacgtggggcccggcgg

SEQ ID NO: 1787 - DNA, 23 bp, Homo sapiens
  source 1..23: mol_type = genomic DNA
ggctgcgacgtggggccggatgg

SEQ ID NO: 1788 - DNA, 23 bp, Homo sapiens
  source 1..23: mol_type = genomic DNA
ggctggcctcccacaagaaaggg

SEQ ID NO: 1789 - DNA, 23 bp, Homo sapiens
  source 1..23: mol_type = genomic DNA
ggctgggacctggggcccgacgg

SEQ ID NO: 1790 - DNA, 23 bp, Homo sapiens
  source 1..23: mol_type = genomic DNA
ggctgggctgaccgcggggtcgg

SEQ ID NO: 1791 - DNA, 23 bp, Homo sapiens
  source 1..23: mol_type = genomic DNA
ggctgtcgaacctcacgaactgg

SEQ ID NO: 1792 - DNA, 23 bp, Homo sapiens
  source 1..23: mol_type = genomic DNA
ggcttacatcgccctgaacgagg

SEQ ID NO: 1793 - DNA, 23 bp, Homo sapiens
  source 1..23: mol_type = genomic DNA
gggaaacggcctctgctgagagg

SEQ ID NO: 1794 - DNA, 23 bp, Homo sapiens
  source 1..23: mol_type = genomic DNA
gggaacctgggggcgaggagggg

SEQ ID NO: 1795 - DNA, 23 bp, Homo sapiens
  source 1..23: mol_type = genomic DNA
gggaagacggctctgggaaaagg

SEQ ID NO: 1796 - DNA, 23 bp, Homo sapiens
  source 1..23: mol_type = genomic DNA
gggaagatggctcccatctcagg

SEQ ID NO: 1797 - DNA, 23 bp, Homo sapiens
  source 1..23: mol_type = genomic DNA
gggaagcaaatgtcctgtgaggg

SEQ ID NO: 1798 - DNA, 23 bp, Homo sapiens
  source 1..23: mol_type = genomic DNA
gggaagccgcgcagggaggaggg

SEQ ID NO: 1799 - DNA, 23 bp, Homo sapiens
  source 1..23: mol_type = genomic DNA
gggaagcggcctctatggagagg

SEQ ID NO: 1800 - DNA, 23 bp, Homo sapiens
  source 1..23: mol_type = genomic DNA
gggaaggctccccactgccccgg

SEQ ID NO: 1801 - DNA, 23 bp, Homo sapiens
  source 1..23: mol_type = genomic DNA
gggacactccagcatgcatgtgg

SEQ ID NO: 1802 - DNA, 23 bp, Homo sapiens
  source 1..23: mol_type = genomic DNA
gggacagtggactgggaagacgg

SEQ ID NO: 1803 - DNA, 23 bp, Homo sapiens
  source 1..23: mol_type = genomic DNA
gggaccgcggcaacgctgattgg

SEQ ID NO: 1804 - DNA, 23 bp, Homo sapiens
  source 1..23: mol_type = genomic DNA
gggacgcgtcacgagtatcccgg

SEQ ID NO: 1805 - DNA, 23 bp, Homo sapiens
  source 1..23: mol_type = genomic DNA
gggactctccgcggccgggccgg

SEQ ID NO: 1806 - DNA, 23 bp, Homo sapiens
  source 1..23: mol_type = genomic DNA
gggagaagaagtgaaactcttgg

SEQ ID NO: 1807 - DNA, 23 bp, Homo sapiens
  source 1..23: mol_type = genomic DNA
gggagactccgcccatgaggcgg

SEQ ID NO: 1808 - DNA, 23 bp, Homo sapiens
  source 1..23: mol_type = genomic DNA
gggagactgggggcgaggagggg

SEQ ID NO: 1809 - DNA, 23 bp, Homo sapiens
  source 1..23: mol_type = genomic DNA
gggagactgggggtgaggagggg

SEQ ID NO: 1810 - DNA, 23 bp, Homo sapiens
  source 1..23: mol_type = genomic DNA
gggagcctgggagcgaggagggg

SEQ ID NO: 1811 - DNA, 23 bp, Homo sapiens
  source 1..23: mol_type = genomic DNA
gggagctcaggtcctcgttcagg

SEQ ID NO: 1812 - DNA, 23 bp, Homo sapiens
  source 1..23: mol_type = genomic DNA
gggagctgggcggggctcggggg

SEQ ID NO: 1813 - DNA, 23 bp, Homo sapiens
  source 1..23: mol_type = genomic DNA
gggaggcgccccgtggtccctgg

SEQ ID NO: 1814 - DNA, 23 bp, Homo sapiens
  source 1..23: mol_type = genomic DNA
gggaggcgccctgtggcccctgg

SEQ ID NO: 1815 - DNA, 23 bp, Homo sapiens
  source 1..23: mol_type = genomic DNA
gggaggctgggggcgaggagggg

SEQ ID NO: 1816 - DNA, 23 bp, Homo sapiens
  source 1..23: mol_type = genomic DNA
gggagggcctgtgcgtggagtgg

SEQ ID NO: 1817 - DNA, 23 bp, Homo sapiens
  source 1..23: mol_type = genomic DNA
gggaggggccctcccggcgaggg

SEQ ID NO: 1818 - DNA, 23 bp, Homo sapiens
  source 1..23: mol_type = genomic DNA
gggagggggcagagggggaaagg

SEQ ID NO: 1819 - DNA, 23 bp, Homo sapiens
  source 1..23: mol_type = genomic DNA
gggatggcctcccacgaggaagg

SEQ ID NO: 1820 - DNA, 23 bp, Homo sapiens
  source 1..23: mol_type = genomic DNA
gggcagagggggaaaggcctggg

SEQ ID NO: 1821 - DNA, 23 bp, Homo sapiens
  source 1..23: mol_type = genomic DNA
gggcaggatcaggaaacacaagg

SEQ ID NO: 1822 - DNA, 23 bp, Homo sapiens
  source 1..23: mol_type = genomic DNA
gggccgcctccaacttgggctgg

SEQ ID NO: 1823 - DNA, 23 bp, Homo sapiens
  source 1..23: mol_type = genomic DNA
gggccgcctccaacttgtgctgg

SEQ ID NO: 1824 - DNA, 23 bp, Homo sapiens
  source 1..23: mol_type = genomic DNA
gggccgcctcccacttacgctgg

SEQ ID NO: 1825 - DNA, 23 bp, Homo sapiens
  source 1..23: mol_type = genomic DNA
gggccgcctcccacttgggctgg

SEQ ID NO: 1826 - DNA, 23 bp, Homo sapiens
  source 1..23: mol_type = genomic DNA
gggccgcctcccatttgcgctgg

SEQ ID NO: 1827 - DNA, 23 bp, Homo sapiens
  source 1..23: mol_type = genomic DNA
gggcctgagaggaaaagtcacgg

SEQ ID NO: 1828 - DNA, 23 bp, Homo sapiens
  source 1..23: mol_type = genomic DNA
gggcgaccccggccgtacgtggg

SEQ ID NO: 1829 - DNA, 23 bp, Homo sapiens
  source 1..23: mol_type = genomic DNA
gggcgccgtgggtggaggagggg

SEQ ID NO: 1830 - DNA, 23 bp, Homo sapiens
  source 1..23: mol_type = genomic DNA
gggcgcctcctccgcgggtatgg

SEQ ID NO: 1831 - DNA, 23 bp, Homo sapiens
  source 1..23: mol_type = genomic DNA
gggcggggcggggcggggccggg

SEQ ID NO: 1832 - DNA, 23 bp, Homo sapiens
  source 1..23: mol_type = genomic DNA
gggcggggctcgggggagctggg

SEQ ID NO: 1833 - DNA, 23 bp, Homo sapiens
  source 1..23: mol_type = genomic DNA
gggcggggggggggtggggtggg

SEQ ID NO: 1834 - DNA, 23 bp, Homo sapiens
  source 1..23: mol_type = genomic DNA
gggcgggtctcagccactcctgg

SEQ ID NO: 1835 - DNA, 23 bp, Homo sapiens
  source 1..23: mol_type = genomic DNA
gggctccatcctcggactcgcgg

SEQ ID NO: 1836 - DNA, 23 bp, Homo sapiens
  source 1..23: mol_type = genomic DNA
gggctccccacggccgggccggg

SEQ ID NO: 1837 - DNA, 23 bp, Homo sapiens
  source 1..23: mol_type = genomic DNA
gggctccccgcagccgggccggg

SEQ ID NO: 1838 - DNA, 23 bp, Homo sapiens
  source 1..23: mol_type = genomic DNA
gggctccccgctgccgggccggg

SEQ ID NO: 1839 - DNA, 23 bp, Homo sapiens
  source 1..23: mol_type = genomic DNA
gggctcccctctcggacttgcgg

SEQ ID NO: 1840 - DNA, 23 bp, Homo sapiens
  source 1..23: mol_type = genomic DNA
gggctccgagacccttgtcccgg

SEQ ID NO: 1841 - DNA, 23 bp, Homo sapiens
  source 1..23: mol_type = genomic DNA
gggctcctcgcggccgggccggg

SEQ ID NO: 1842 - DNA, 23 bp, Homo sapiens
  source 1..23: mol_type = genomic DNA
gggctcgggggagctgggcgggg

SEQ ID NO: 1843 - DNA, 23 bp, Homo sapiens
  source 1..23: mol_type = genomic DNA
gggctctccgcggccgggccagg

SEQ ID NO: 1844 - DNA, 23 bp, Homo sapiens
  source 1..23: mol_type = genomic DNA
gggctctccgcggccgggcccgg

SEQ ID NO: 1845 - DNA, 23 bp, Homo sapiens
  source 1..23: mol_type = genomic DNA
gggctctccgcggcctggccggg

SEQ ID NO: 1846 - DNA, 23 bp, Homo sapiens
  source 1..23: mol_type = genomic DNA
gggctgcctcccacttgcgctgg

SEQ ID NO: 1847 - DNA, 23 bp, Homo sapiens
  source 1..23: mol_type = genomic DNA
gggctggcctcccacaagaaagg

SEQ ID NO: 1848 - DNA, 23 bp, Homo sapiens
  source 1..23: mol_type = genomic DNA
gggctgggtgatctgagccgcgg

SEQ ID NO: 1849 - DNA, 23 bp, Homo sapiens
  source 1..23: mol_type = genomic DNA
ggggactgggctgaccacggggg

SEQ ID NO: 1850 - DNA, 23 bp, Homo sapiens
  source 1..23: mol_type = genomic DNA
ggggactgggctgaccgcgaggg

SEQ ID NO: 1851 - DNA, 23 bp, Homo sapiens
  source 1..23: mol_type = genomic DNA
ggggagccgcgccgggaggtggg

SEQ ID NO: 1852 - DNA, 23 bp, Homo sapiens
  source 1..23: mol_type = genomic DNA
ggggagccgcgccggtaggaggg

SEQ ID NO: 1853 - DNA, 23 bp, Homo sapiens
  source 1..23: mol_type = genomic DNA
ggggagcggcgcagggaggaggg

SEQ ID NO: 1854 - DNA, 23 bp, Homo sapiens
  source 1..23: mol_type = genomic DNA
ggggagcggcgcagggaggtggg

SEQ ID NO: 1855 - DNA, 23 bp, Homo sapiens
  source 1..23: mol_type = genomic DNA
ggggagctgggcggggctcgggg

SEQ ID NO: 1856 - DNA, 23 bp, Homo sapiens
  source 1..23: mol_type = genomic DNA
ggggatgaggcctgcgccccggg

SEQ ID NO: 1857 - DNA, 23 bp, Homo sapiens
  source 1..23: mol_type = genomic DNA
ggggcagagggggaaaggcctgg

SEQ ID NO: 1858 - DNA, 23 bp, Homo sapiens
  source 1..23: mol_type = genomic DNA
ggggccagagtattgggaccggg

SEQ ID NO: 1859 - DNA, 23 bp, Homo sapiens
  source 1..23: mol_type = genomic DNA
ggggccccgaccctgctgaaggg

SEQ ID NO: 1860 - DNA, 23 bp, Homo sapiens
  source 1..23: mol_type = genomic DNA
ggggccggagtactgggaccggg

SEQ ID NO: 1861 - DNA, 23 bp, Homo sapiens
  source 1..23: mol_type = genomic DNA
ggggccggagtattaggaccggg

SEQ ID NO: 1862 - DNA, 23 bp, Homo sapiens
  source 1..23: mol_type = genomic DNA
ggggccggagtgttgggaccggg

SEQ ID NO: 1863 - DNA, 23 bp, Homo sapiens
  source 1..23: mol_type = genomic DNA
ggggcgaccccggccgtacgtgg

SEQ ID NO: 1864 - DNA, 23 bp, Homo sapiens
  source 1..23: mol_type = genomic DNA
ggggcgccatgacggccatcggg

SEQ ID NO: 1865 - DNA, 23 bp, Homo sapiens
  source 1..23: mol_type = genomic DNA
ggggcggggccggggggacgggg

SEQ ID NO: 1866 - DNA, 23 bp, Homo sapiens
  source 1..23: mol_type = genomic DNA
ggggcggggcggggcggggccgg

SEQ ID NO: 1867 - DNA, 23 bp, Homo sapiens
  source 1..23: mol_type = genomic DNA
ggggcggggttcgggggacgggg

SEQ ID NO: 1868 - DNA, 23 bp, Homo sapiens
  source 1..23: mol_type = genomic DNA
ggggctccccacggccgggccgg

SEQ ID NO: 1869 - DNA, 23 bp, Homo sapiens
  source 1..23: mol_type = genomic DNA
ggggctccccgcagccgggccgg

SEQ ID NO: 1870 - DNA, 23 bp, Homo sapiens
  source 1..23: mol_type = genomic DNA
ggggctccccgctgccgggccgg

SEQ ID NO: 1871 - DNA, 23 bp, Homo sapiens
  source 1..23: mol_type = genomic DNA
ggggctcctcgcggccgggccgg

SEQ ID NO: 1872 - DNA, 23 bp, Homo sapiens
  source 1..23: mol_type = genomic DNA
ggggctcgggggagctgggcggg

SEQ ID NO: 1873 - DNA, 23 bp, Homo sapiens
  source 1..23: mol_type = genomic DNA
ggggctctccgcggcctggccgg

SEQ ID NO: 1874 - DNA, 23 bp, Homo sapiens
  source 1..23: mol_type = genomic DNA
ggggctggagtattgggaccggg

SEQ ID NO: 1875 - DNA, 23 bp, Homo sapiens
  source 1..23: mol_type = genomic DNA
ggggctggggcggggttcggggg

SEQ ID NO: 1876 - DNA, 23 bp, Homo sapiens
  source 1..23: mol_type = genomic DNA
gggggacggggctggccgcgggg

SEQ ID NO: 1877 - DNA, 23 bp, Homo sapiens
  source 1..23: mol_type = genomic DNA
gggggactgggctgaccacgggg

SEQ ID NO: 1878 - DNA, 23 bp, Homo sapiens
  source 1..23: mol_type = genomic DNA
gggggactgggctgaccgcgagg

SEQ ID NO: 1879 - DNA, 23 bp, Homo sapiens
  source 1..23: mol_type = genomic DNA
gggggagccgcgggcgccgtggg

SEQ ID NO: 1880 - DNA, 23 bp, Homo sapiens
  source 1..23: mol_type = genomic DNA
gggggagctgggcggggctcggg

SEQ ID NO: 1881 - DNA, 23 bp, Homo sapiens
  source 1..23: mol_type = genomic DNA
gggggatgaggcctgcgccccgg

SEQ ID NO: 1882 - DNA, 23 bp, Homo sapiens
  source 1..23: mol_type = genomic DNA
ggggggagccgcgggcgccgtgg

SEQ ID NO: 1883 - DNA, 23 bp, Homo sapiens
  source 1..23: mol_type = genomic DNA
ggggggggggcagaggggaaagg

SEQ ID NO: 1884 - DNA, 23 bp, Homo sapiens
  source 1..23: mol_type = genomic DNA
ggggggggggtggggtggggagg

SEQ ID NO: 1885 - DNA, 23 bp, Homo sapiens
  source 1..23: mol_type = genomic DNA
ggggtcctgacctgcgccaccgg

SEQ ID NO: 1886 - DNA, 23 bp, Homo sapiens
  source 1..23: mol_type = genomic DNA
ggggtcgctccgcagatacctgg

SEQ ID NO: 1887 - DNA, 23 bp, Homo sapiens
  source 1..23: mol_type = genomic DNA
ggggtcgtgacctgcgccccagg

SEQ ID NO: 1888 - DNA, 23 bp, Homo sapiens
  source 1..23: mol_type = genomic DNA
ggggtctagagtgggcagggggg

SEQ ID NO: 1889 - DNA, 23 bp, Homo sapiens
  source 1..23: mol_type = genomic DNA
ggggtggcgggtctggggggggg

SEQ ID NO: 1890 - DNA, 23 bp, Homo sapiens
  source 1..23: mol_type = genomic DNA
ggggttccccgcggccgggccgg

SEQ ID NO: 1891 - DNA, 23 bp, Homo sapiens
  source 1..23: mol_type = genomic DNA
gggtcacgtgtgtctttgcgggg

SEQ ID NO: 1892 - DNA, 23 bp, Homo sapiens
  source 1..23: mol_type = genomic DNA
gggtctccttcccgttctccagg

SEQ ID NO: 1893 - DNA, 23 bp, Homo sapiens
  source 1..23: mol_type = genomic DNA
gggtgaagggatgaagggtgggg

SEQ ID NO: 1894 - DNA, 23 bp, Homo sapiens
  source 1..23: mol_type = genomic DNA
gggtggcgggtctgggggggggg

SEQ ID NO: 1895 - DNA, 23 bp, Homo sapiens
  source 1..23: mol_type = genomic DNA
gggtggggagggggcagaggggg

SEQ ID NO: 1896 - DNA, 23 bp, Homo sapiens
  source 1..23: mol_type = genomic DNA
gggttccccgcggccgggccggg

SEQ ID NO: 1897 - DNA, 23 bp, Homo sapiens
  source 1..23: mol_type = genomic DNA
gggttttgttgtcccactggggg

SEQ ID NO: 1898 - DNA, 23 bp, Homo sapiens
  source 1..23: mol_type = genomic DNA
ggtactgcggagacgctgattgg

SEQ ID NO: 1899 - DNA, 23 bp, Homo sapiens
  source 1..23: mol_type = genomic DNA
ggtagaacaaaaaaaatacctgg

SEQ ID NO: 1900 - DNA, 23 bp, Homo sapiens
  source 1..23: mol_type = genomic DNA
ggtagggaaggggtggggagtgg

SEQ ID NO: 1901 - DNA, 23 bp, Homo sapiens
  source 1..23: mol_type = genomic DNA
ggtccactcggtcagtctcctgg

SEQ ID NO: 1902 - DNA, 23 bp, Homo sapiens
  source 1..23: mol_type = genomic DNA
ggtccatgcggcgggagcagcgg

SEQ ID NO: 1903 - DNA, 23 bp, Homo sapiens
  source 1..23: mol_type = genomic DNA
ggtcccagccgtacatcctctgg

SEQ ID NO: 1904 - DNA, 23 bp, Homo sapiens
  source 1..23: mol_type = genomic DNA
ggtcccgcggcctcagggggcgg

SEQ ID NO: 1905 - DNA, 23 bp, Homo sapiens
  source 1..23: mol_type = genomic DNA
ggtccctgacgacagacctcagg

SEQ ID NO: 1906 - DNA, 23 bp, Homo sapiens
  source 1..23: mol_type = genomic DNA
ggtccgagatccgccccctgagg

SEQ ID NO: 1907 - DNA, 23 bp, Homo sapiens
  source 1..23: mol_type = genomic DNA
ggtcctttggatattgtgtttgg

SEQ ID NO: 1908 - DNA, 23 bp, Homo sapiens
  source 1..23: mol_type = genomic DNA
ggtcgcagccatacatccgctgg

SEQ ID NO: 1909 - DNA, 23 bp, Homo sapiens
  source 1..23: mol_type = genomic DNA
ggtcgcagccatacatcctccgg

SEQ ID NO: 1910 - DNA, 23 bp, Homo sapiens
  source 1..23: mol_type = genomic DNA
ggtcgcagccgtacatgctctgg

SEQ ID NO: 1911 - DNA, 23 bp, Homo sapiens
  source 1..23: mol_type = genomic DNA
ggtctgcagtcacacattactgg

SEQ ID NO: 1912 - DNA, 23 bp, Homo sapiens
  source 1..23: mol_type = genomic DNA
ggtgagacccctcactgtgatgg

SEQ ID NO: 1913 - DNA, 23 bp, Homo sapiens
  source 1..23: mol_type = genomic DNA
ggtgcccaaggctgctgcagggg

SEQ ID NO: 1914 - DNA, 23 bp, Homo sapiens
  source 1..23: mol_type = genomic DNA
ggtgccggaggattgggaccggg

SEQ ID NO: 1915 - DNA, 23 bp, Homo sapiens
  source 1..23: mol_type = genomic DNA
ggtgctctccgcggccaggccgg

SEQ ID NO: 1916 - DNA, 23 bp, Homo sapiens
  source 1..23: mol_type = genomic DNA
ggtggacatgggggtggggtggg

SEQ ID NO: 1917 - DNA, 23 bp, Homo sapiens
  source 1..23: mol_type = genomic DNA
ggtggcgggtctggggggggggg

SEQ ID NO: 1918 - DNA, 23 bp, Homo sapiens
  source 1..23: mol_type = genomic DNA
ggtggggtggcgggtctgggggg

SEQ ID NO: 1919 - DNA, 23 bp, Homo sapiens
  source 1..23: mol_type = genomic DNA
ggtgggtgagctcctccacacgg

SEQ ID NO: 1920 - DNA, 23 bp, Homo sapiens
  source 1..23: mol_type = genomic DNA
ggtggtcatatgtgtcttggggg

SEQ ID NO: 1921 - DNA, 23 bp, Homo sapiens
  source 1..23: mol_type = genomic DNA
ggtggtggtcatatgtgtcttgg

SEQ ID NO: 1922 - DNA, 23 bp, Homo sapiens
  source 1..23: mol_type = genomic DNA
ggtgtagatacctcatggagtgg

SEQ ID NO: 1923 - DNA, 23 bp, Homo sapiens
  source 1..23: mol_type = genomic DNA
ggtgtggctccgcagatacctgg

SEQ ID NO: 1924 - DNA, 23 bp, Homo sapiens
  source 1..23: mol_type = genomic DNA
ggttagtcatatgcgttttgggg

SEQ ID NO: 1925 - DNA, 23 bp, Homo sapiens
  source 1..23: mol_type = genomic DNA
ggttccatcccctgcaggcttgg

SEQ ID NO: 1926 - DNA, 23 bp, Homo sapiens
  source 1..23: mol_type = genomic DNA
ggttccatctcctgctcgcctgg

SEQ ID NO: 1927 - DNA, 23 bp, Homo sapiens
  source 1..23: mol_type = genomic DNA
ggttctatctcctgcaggtctgg

SEQ ID NO: 1928 - DNA, 23 bp, Homo sapiens
  source 1..23: mol_type = genomic DNA
ggttctatctcctgccggtctgg

SEQ ID NO: 1929 - DNA, 23 bp, Homo sapiens
  source 1..23: mol_type = genomic DNA
ggttgcagccacacatccactgg

SEQ ID NO: 1930 - DNA, 23 bp, Homo sapiens
  source 1..23: mol_type = genomic DNA
ggttgcgacgtggggccggacgg

SEQ ID NO: 1931 - DNA, 23 bp, Homo sapiens
  source 1..23: mol_type = genomic DNA
gtaaagtgactcaaaagtgctgg

SEQ ID NO: 1932 - DNA, 23 bp, Homo sapiens
  source 1..23: mol_type = genomic DNA
gtaacccactgagatgaagcggg

SEQ ID NO: 1933 - DNA, 23 bp, Homo sapiens
  source 1..23: mol_type = genomic DNA
gtaagccttgccgtcgtaggcgg

SEQ ID NO: 1934 - DNA, 23 bp, Homo sapiens
  source 1..23: mol_type = genomic DNA
gtaaggctgcgacgtggggccgg

SEQ ID NO: 1935 - DNA, 23 bp, Homo sapiens
  source 1..23: mol_type = genomic DNA
gtaagtgatgacattctgaacgg

SEQ ID NO: 1936 - DNA, 23 bp, Homo sapiens
  source 1..23: mol_type = genomic DNA
gtaatccttgccgtcctaggcgg

SEQ ID NO: 1937 - DNA, 23 bp, Homo sapiens
  source 1..23: mol_type = genomic DNA
gtaatccttgccgtcgcaggcgg

SEQ ID NO: 1938 - DNA, 23 bp, Homo sapiens
  source 1..23: mol_type = genomic DNA
gtaatccttgccgtcttaggcgg

SEQ ID NO: 1939 - DNA, 23 bp, Homo sapiens
  source 1..23: mol_type = genomic DNA
gtacggctgcgacctggggccgg

SEQ ID NO: 1940 - DNA, 23 bp, Homo sapiens
  source 1..23: mol_type = genomic DNA
gtacgtctgtgtgttggtcttgg

SEQ ID NO: 1941 - DNA, 23 bp, Homo sapiens
  source 1..23: mol_type = genomic DNA
gtagaaatacctcaaggagtggg

SEQ ID NO: 1942 - DNA, 23 bp, Homo sapiens
  source 1..23: mol_type = genomic DNA
gtagaaatacctcatgaagtggg

SEQ ID NO: 1943 - DNA, 23 bp, Homo sapiens
  source 1..23: mol_type = genomic DNA
gtagaaatacctcatggagaggg

SEQ ID NO: 1944 - DNA, 23 bp, Homo sapiens
  source 1..23: mol_type = genomic DNA
gtagaaatacctcatggagtagg

SEQ ID NO: 1945 - DNA, 23 bp, Homo sapiens
  source 1..23: mol_type = genomic DNA
gtagcccacagcgatgaagcggg

SEQ ID NO: 1946 - DNA, 23 bp, Homo sapiens
  source 1..23: mol_type = genomic DNA
gtagcccacggcgatgaagcagg

SEQ ID NO: 1947 - DNA, 23 bp, Homo sapiens
  source 1..23: mol_type = genomic DNA
gtagcccacggtaatgaagcggg

SEQ ID NO: 1948 - DNA, 23 bp, Homo sapiens
  source 1..23: mol_type = genomic DNA
gtagcccactgagacgaagcggg

SEQ ID NO: 1949 - DNA, 23 bp, Homo sapiens
  source 1..23: mol_type = genomic DNA
gtagcgcactgagatgaagcggg

SEQ ID NO: 1950 - DNA, 23 bp, Homo sapiens
  source 1..23: mol_type = genomic DNA
gtaggaggaagagttctggtagg

SEQ ID NO: 1951 - DNA, 23 bp, Homo sapiens
  source 1..23: mol_type = genomic DNA
gtagggaaggggtggggagtggg

SEQ ID NO: 1952 - DNA, 23 bp, Homo sapiens
  source 1..23: mol_type = genomic DNA
gtatctacaccgccgtgtcccgg

SEQ ID NO: 1953 - DNA, 23 bp, Homo sapiens
  source 1..23: mol_type = genomic DNA
gtatggctgcgacatggggccgg

SEQ ID NO: 1954 - DNA, 23 bp, Homo sapiens
  source 1..23: mol_type = genomic DNA
gtatggctgcgacgtggagccgg

SEQ ID NO: 1955 - DNA, 23 bp, Homo sapiens
  source 1..23: mol_type = genomic DNA
gtatggttgcgacgtggggccgg

SEQ ID NO: 1956 - DNA, 23 bp, Homo sapiens
  source 1..23: mol_type = genomic DNA
gtattcgagggatcgtcttccgg

SEQ ID NO: 1957 - DNA, 23 bp, Homo sapiens
  source 1..23: mol_type = genomic DNA
gtcacgagtatcccggaagaagg

SEQ ID NO: 1958 - DNA, 23 bp, Homo sapiens
  source 1..23: mol_type = genomic DNA
gtcactcaccggcctcgctccgg

SEQ ID NO: 1959 - DNA, 23 bp, Homo sapiens
  source 1..23: mol_type = genomic DNA
gtcactcaccggtctcgctctgg

SEQ ID NO: 1960 - DNA, 23 bp, Homo sapiens
  source 1..23: mol_type = genomic DNA
gtcactcaccgtcctcgctccgg

SEQ ID NO: 1961 - DNA, 23 bp, Homo sapiens
  source 1..23: mol_type = genomic DNA
gtcactcacggtcctcgctctgg

SEQ ID NO: 1962 - DNA, 23 bp, Homo sapiens
  source 1..23: mol_type = genomic DNA
gtcagtctgtgtgttggtcttgg

SEQ ID NO: 1963 - DNA, 23 bp, Homo sapiens
  source 1..23: mol_type = genomic DNA
gtccctataatactgatcagggg

SEQ ID NO: 1964 - DNA, 23 bp, Homo sapiens
  source 1..23: mol_type = genomic DNA
gtcctccccatcccgctgtcagg

SEQ ID NO: 1965 - DNA, 23 bp, Homo sapiens
  source 1..23: mol_type = genomic DNA
gtcctccctatcccgctgccagg

SEQ ID NO: 1966 - DNA, 23 bp, Homo sapiens
  source 1..23: mol_type = genomic DNA
gtcctcgccatcccgctaccagg

SEQ ID NO: 1967 - DNA, 23 bp, Homo sapiens
  source 1..23: mol_type = genomic DNA
gtccttgccatcccgctgccagg

SEQ ID NO: 1968 - DNA, 23 bp, Homo sapiens
  source 1..23: mol_type = genomic DNA
gtcctttggatattgtgtttggg

SEQ ID NO: 1969 - DNA, 23 bp, Homo sapiens
  source 1..23: mol_type = genomic DNA
gtcggggctggggcggggttcgg

SEQ ID NO: 1970 - DNA, 23 bp, Homo sapiens
  source 1..23: mol_type = genomic DNA
gtctagagtgggcaggggggtgg

SEQ ID NO: 1971 - DNA, 23 bp, Homo sapiens
  source 1..23: mol_type = genomic DNA
gtctagagtgggcgggggggggg

SEQ ID NO: 1972 - DNA, 23 bp, Homo sapiens
  source 1..23: mol_type = genomic DNA
gtctcccggtcccaacactccgg

SEQ ID NO: 1973 - DNA, 23 bp, Homo sapiens
  source 1..23: mol_type = genomic DNA
gtctcccggtcccaatactctgg

SEQ ID NO: 1974 - DNA, 23 bp, Homo sapiens
  source 1..23: mol_type = genomic DNA
gtctcccggtcccaatcctccgg

SEQ ID NO: 1975 - DNA, 23 bp, Homo sapiens
  source 1..23: mol_type = genomic DNA
gtctcccggtcccagtactccgg

SEQ ID NO: 1976 - DNA, 23 bp, Homo sapiens
  source 1..23: mol_type = genomic DNA
gtctcccggtcctaatactccgg

SEQ ID NO: 1977 - DNA, 23 bp, Homo sapiens
  source 1..23: mol_type = genomic DNA
gtctcggagccccgcggcttcgg

SEQ ID NO: 1978 - DNA, 23 bp, Homo sapiens
  source 1..23: mol_type = genomic DNA
gtctggagggtgtgagaccctgg

SEQ ID NO: 1979 - DNA, 23 bp, Homo sapiens
  source 1..23: mol_type = genomic DNA
gtcttccccatcccgctgccagg

SEQ ID NO: 1980 - DNA, 23 bp, Homo sapiens
  source 1..23: mol_type = genomic DNA
gtcttgaagatctgtgtgttcgg

SEQ ID NO: 1981 - DNA, 23 bp, Homo sapiens
  source 1..23: mol_type = genomic DNA
gtgaacctgcggcaactgcgcgg

SEQ ID NO: 1982 - DNA, 23 bp, Homo sapiens
  source 1..23: mol_type = genomic DNA
gtgaccccggccggtggcgcagg

SEQ ID NO: 1983 - DNA, 23 bp, Homo sapiens
  source 1..23: mol_type = genomic DNA
gtgactggtgactttagaaccgg

SEQ ID NO: 1984 - DNA, 23 bp, Homo sapiens
  source 1..23: mol_type = genomic DNA
gtgagcctgcggaaactgcgcgg

SEQ ID NO: 1985 - DNA, 23 bp, Homo sapiens
  source 1..23: mol_type = genomic DNA
gtgagcctgcggaacctgcttgg

SEQ ID NO: 1986 - DNA, 23 bp, Homo sapiens
  source 1..23: mol_type = genomic DNA
gtgctctccgcggccaggccggg

SEQ ID NO: 1987 - DNA, 23 bp, Homo sapiens
  source 1..23: mol_type = genomic DNA
gtgctggcacacagggccccagg

SEQ ID NO: 1988 - DNA, 23 bp, Homo sapiens
  source 1..23: mol_type = genomic DNA
gtgctgggtgatctgagccgcgg

SEQ ID NO: 1989 - DNA, 23 bp, Homo sapiens
  source 1..23: mol_type = genomic DNA
gtggaagcctgggggcgaggagg

SEQ ID NO: 1990 - DNA, 23 bp, Homo sapiens
  source 1..23: mol_type = genomic DNA
gtggacctggggaccctgcacgg

SEQ ID NO: 1991 - DNA, 23 bp, Homo sapiens
  source 1..23: mol_type = genomic DNA
gtggactgggaagacggctccgg

SEQ ID NO: 1992 - DNA, 23 bp, Homo sapiens
  source 1..23: mol_type = genomic DNA
gtggagaccaggcctgccagggg

SEQ ID NO: 1993 - DNA, 23 bp, Homo sapiens
  source 1..23: mol_type = genomic DNA
gtggagcaggaggggccggacgg

SEQ ID NO: 1994 - DNA, 23 bp, Homo sapiens
  source 1..23: mol_type = genomic DNA
gtggatggagcaggaggggccgg

SEQ ID NO: 1995 - DNA, 23 bp, Homo sapiens
  source 1..23: mol_type = genomic DNA
gtggatgtgtggctgcaacctgg

SEQ ID NO: 1996 - DNA, 23 bp, Homo sapiens
  source 1..23: mol_type = genomic DNA
gtggcgggtctgggggggggggg

SEQ ID NO: 1997 - DNA, 23 bp, Homo sapiens
  source 1..23: mol_type = genomic DNA
gtgggaacctgggggcgaggagg

SEQ ID NO: 1998 - DNA, 23 bp, Homo sapiens
  source 1..23: mol_type = genomic DNA
gtgggagactgggggcgaggagg

SEQ ID NO: 1999 - DNA, 23 bp, Homo sapiens
  source 1..23: mol_type = genomic DNA
gtgggagactgggggtgaggagg

SEQ ID NO: 2000 - DNA, 23 bp, Homo sapiens
  source 1..23: mol_type = genomic DNA
gtgggagcctgggagcgaggagg

SEQ ID NO: 2001 - DNA, 23 bp, Homo sapiens
  source 1..23: mol_type = genomic DNA
gtgggaggcagcccgtgaggcgg

SEQ ID NO: 2002 - DNA, 23 bp, Homo sapiens
  source 1..23: mol_type = genomic DNA
gtgggaggcggcccgggtggcgg

SEQ ID NO: 2003 - DNA, 23 bp, Homo sapiens
  source 1..23: mol_type = genomic DNA
gtgggaggcggcccgtatggcgg

SEQ ID NO: 2004 - DNA, 23 bp, Homo sapiens
  source 1..23: mol_type = genomic DNA
gtgggaggcggcccgtgtggagg

SEQ ID NO: 2005 - DNA, 23 bp, Homo sapiens
  source 1..23: mol_type = genomic DNA
gtgggaggcggccggtgaggcgg

SEQ ID NO: 2006 - DNA, 23 bp, Homo sapiens
  source 1..23: mol_type = genomic DNA
gtgggaggcggcctgtgaggcgg

SEQ ID NO: 2007 - DNA, 23 bp, Homo sapiens
  source 1..23: mol_type = genomic DNA
gtgggaggcggctcgtgaggcgg

SEQ ID NO: 2008 - DNA, 23 bp, Homo sapiens
  source 1..23: mol_type = genomic DNA
gtgggaggctgggggcgaggagg

SEQ ID NO: 2009 - DNA, 23 bp, Homo sapiens
  source 1..23: mol_type = genomic DNA
gtgggcctgcggaacctgcgcgg

SEQ ID NO: 2010 - DNA, 23 bp, Homo sapiens
  source 1..23: mol_type = genomic DNA
gtggggtggcgggtctggggggg

SEQ ID NO: 2011 - DNA, 23 bp, Homo sapiens
  source 1..23: mol_type = genomic DNA
gtgggtcacgtgtgtctttgcgg

SEQ ID NO: 2012 - DNA, 23 bp, Homo sapiens
  source 1..23: mol_type = genomic DNA
gtgggtggagaaggaggggccgg

SEQ ID NO: 2013 - DNA, 23 bp, Homo sapiens
  source 1..23: mol_type = genomic DNA
gtggtcatatgtgtcttgggggg

SEQ ID NO: 2014 - DNA, 23 bp, Homo sapiens
  source 1..23: mol_type = genomic DNA
gtggtggtcatatgtgtcttggg

SEQ ID NO: 2015 - DNA, 23 bp, Homo sapiens
  source 1..23: mol_type = genomic DNA
gtggttagtcatatgcgttttgg

SEQ ID NO: 2016 - DNA, 23 bp, Homo sapiens
  source 1..23: mol_type = genomic DNA
gtgtagatacctcatggagtggg

SEQ ID NO: 2017 - DNA, 23 bp, Homo sapiens
  source 1..23: mol_type = genomic DNA
gtgtaggcataatgtgaggaggg

SEQ ID NO: 2018 - DNA, 23 bp, Homo sapiens
  source 1..23: mol_type = genomic DNA
gtgtccgcggcggtccaggaggg

SEQ ID NO: 2019 - DNA, 23 bp, Homo sapiens
  source 1..23: mol_type = genomic DNA
gtgtctctcatcacttgtaaagg

SEQ ID NO: 2020 - DNA, 23 bp, Homo sapiens
  source 1..23: mol_type = genomic DNA
gtgtctttgcggggtctgatggg

SEQ ID NO: 2021 - DNA, 23 bp, Homo sapiens
  source 1..23: mol_type = genomic DNA
gtgtgactgcagacccaggcggg

SEQ ID NO: 2022 - DNA, 23 bp, Homo sapiens
  source 1..23: mol_type = genomic DNA
gtgttcccgtcccaatattccgg

SEQ ID NO: 2023 - DNA, 23 bp, Homo sapiens
  source 1..23: mol_type = genomic DNA
gtgttccggtcccaatgctccgg

SEQ ID NO: 2024 - DNA, 23 bp, Homo sapiens
  source 1..23: mol_type = genomic DNA
gtgttcgggtcccaatactccgg

SEQ ID NO: 2025 - DNA, 23 bp, Homo sapiens
  source 1..23: mol_type = genomic DNA
gttagtcatatgcgttttggggg

SEQ ID NO: 2026 - DNA, 23 bp, Homo sapiens
  source 1..23: mol_type = genomic DNA
gttccatcccctggcaggcctgg

SEQ ID NO: 2027 - DNA, 23 bp, Homo sapiens
  source 1..23: mol_type = genomic DNA
gttctagaagtcccaggtcccgg

SEQ ID NO: 2028 - DNA, 23 bp, Homo sapiens
  source 1..23: mol_type = genomic DNA
gttctggtagggaaggggtgagg

SEQ ID NO: 2029 - DNA, 23 bp, Homo sapiens
  source 1..23: mol_type = genomic DNA
gttgaggtcaaaatccccgcggg

SEQ ID NO: 2030 - DNA, 23 bp, Homo sapiens
  source 1..23: mol_type = genomic DNA
gttgcgacgtggggccggacggg

SEQ ID NO: 2031 - DNA, 23 bp, Homo sapiens
  source 1..23: mol_type = genomic DNA
gttggacaggaggaattatgggg

SEQ ID NO: 2032 - DNA, 23 bp, Homo sapiens
  source 1..23: mol_type = genomic DNA
gttggaggcggcccgtggggcgg

SEQ ID NO: 2033 - DNA, 23 bp, Homo sapiens
  source 1..23: mol_type = genomic DNA
gttggggaatctccaaggctggg

SEQ ID NO: 2034 - DNA, 23 bp, Homo sapiens
  source 1..23: mol_type = genomic DNA
gttggtgtaggcataatgtgagg

SEQ ID NO: 2035 - DNA, 23 bp, Homo sapiens
  source 1..23: mol_type = genomic DNA
gttgtaatccttgccgtcgtagg

SEQ ID NO: 2036 - DNA, 23 bp, Homo sapiens
  source 1..23: mol_type = genomic DNA
gtttaggccaaaaatccccctgg

SEQ ID NO: 2037 - DNA, 23 bp, Homo sapiens
  source 1..23: mol_type = genomic DNA
gtttccagagagtgactctgagg

SEQ ID NO: 2038 - DNA, 23 bp, Homo sapiens
  source 1..23: mol_type = genomic DNA
gtttctccacatccgtgtcctgg

SEQ ID NO: 2039 - DNA, 23 bp, Homo sapiens
  source 1..23: mol_type = genomic DNA
taaagcacctgttacaatgaagg

SEQ ID NO: 2040 - DNA, 23 bp, Homo sapiens
  source 1..23: mol_type = genomic DNA
taacccactgagatgaagcgggg

SEQ ID NO: 2041 - DNA, 23 bp, Homo sapiens
  source 1..23: mol_type = genomic DNA
taaggagacgctgcagcgcacgg

SEQ ID NO: 2042 - DNA, 23 bp, Homo sapiens
  source 1..23: mol_type = genomic DNA
taaggccctgactcctttctggg

SEQ ID NO: 2043 - DNA, 23 bp, Homo sapiens
  source 1..23: mol_type = genomic DNA
taagtgggaggcggcccgtgagg

SEQ ID NO: 2044 - DNA, 23 bp, Homo sapiens
  source 1..23: mol_type = genomic DNA
taatcttctattccctgacgagg

SEQ ID NO: 2045 - DNA, 23 bp, Homo sapiens
  source 1..23: mol_type = genomic DNA
taatcttctattccctgcagagg

SEQ ID NO: 2046 - DNA, 23 bp, Homo sapiens
  source 1..23: mol_type = genomic DNA
taatgaagcggggctccccgcgg

SEQ ID NO: 2047 - DNA, 23 bp, Homo sapiens
  source 1..23: mol_type = genomic DNA
taatgtgtgactgcagacccagg

SEQ ID NO: 2048 - DNA, 23 bp, Homo sapiens
  source 1..23: mol_type = genomic DNA
taattgtcctagacagcagaggg

SEQ ID NO: 2049 - DNA, 23 bp, Homo sapiens
  source 1..23: mol_type = genomic DNA
tacacatccgtgtcccggcccgg

SEQ ID NO: 2050 - DNA, 23 bp, Homo sapiens
  source 1..23: mol_type = genomic DNA
tacaccgccatgacccggcccgg

SEQ ID NO: 2051 - DNA, 23 bp, Homo sapiens
  source 1..23: mol_type = genomic DNA
tacaccgccgtgtcccggccagg

SEQ ID NO: 2052 - DNA, 23 bp, Homo sapiens
  source 1..23: mol_type = genomic DNA
tacaccgccgtgtcccggcctgg

SEQ ID NO: 2053 - DNA, 23 bp, Homo sapiens
  source 1..23: mol_type = genomic DNA
tacaccgccgtgtccgggcccgg

SEQ ID NO: 2054 - DNA, 23 bp, Homo sapiens
  source 1..23: mol_type = genomic DNA
tacaccgctatgtcccggcccgg

SEQ ID NO: 2055 - DNA, 23 bp, Homo sapiens
  source 1..23: mol_type = genomic DNA
tacatctccgtgtcccggcccgg

SEQ ID NO: 2056 - DNA, 23 bp, Homo sapiens
  source 1..23: mol_type = genomic DNA
taccaccactacgcctacgacgg

SEQ ID NO: 2057 - DNA, 23 bp, Homo sapiens
  source 1..23: mol_type = genomic DNA
taccaccagttcgcctacgacgg

SEQ ID NO: 2058 - DNA, 23 bp, Homo sapiens
  source 1..23: mol_type = genomic DNA
tacccagcgcaagttggaggcgg

SEQ ID NO: 2059 - DNA, 23 bp, Homo sapiens
  source 1..23: mol_type = genomic DNA
taccggcagcacgcctacgacgg

SEQ ID NO: 2060 - DNA, 23 bp, Homo sapiens
  source 1..23: mol_type = genomic DNA
taccggcaggacgcctaagacgg

SEQ ID NO: 2061 - DNA, 23 bp, Homo sapiens
  source 1..23: mol_type = genomic DNA
taccggcaggacgcctacgaagg

SEQ ID NO: 2062 - DNA, 23 bp, Homo sapiens
  source 1..23: mol_type = genomic DNA
taccggcaggtcgcctacgacgg

SEQ ID NO: 2063 - DNA, 23 bp, Homo sapiens
  source 1..23: mol_type = genomic DNA
taccgttctccaggtatctgcgg

SEQ ID NO: 2064 - DNA, 23 bp, Homo sapiens
  source 1..23: mol_type = genomic DNA
tacctcaaggagtgggagcctgg

SEQ ID NO: 2065 - DNA, 23 bp, Homo sapiens
  source 1..23: mol_type = genomic DNA
tacctcatgaagtgggagcctgg

SEQ ID NO: 2066 - DNA, 23 bp, Homo sapiens
  source 1..23: mol_type = genomic DNA
tacctcatggagagggagcctgg

SEQ ID NO: 2067 - DNA, 23 bp, Homo sapiens
  source 1..23: mol_type = genomic DNA
tacctcatggagtaggagcctgg

SEQ ID NO: 2068 - DNA, 23 bp, Homo sapiens
  source 1..23: mol_type = genomic DNA
tacctcatggagtggaagcctgg

SEQ ID NO: 2069 - DNA, 23 bp, Homo sapiens
  source 1..23: mol_type = genomic DNA
tacctcatggagtgggaacctgg

SEQ ID NO: 2070 - DNA, 23 bp, Homo sapiens
  source 1..23: mol_type = genomic DNA
tacctggagggcctgtgcgtggg

SEQ ID NO: 2071 - DNA, 23 bp, Homo sapiens
  source 1..23: mol_type = genomic DNA
tacgtcatggagtgggagcctgg

SEQ ID NO: 2072 - DNA, 23 bp, Homo sapiens
  source 1..23: mol_type = genomic DNA
tactacaaccagagcgagaccgg

SEQ ID NO: 2073 - DNA, 23 bp, Homo sapiens
  source 1..23: mol_type = genomic DNA
tactacaaccggagcgaggacgg

SEQ ID NO: 2074 - DNA, 23 bp, Homo sapiens
  source 1..23: mol_type = genomic DNA
tactacaaccggagcgaggccgg

SEQ ID NO: 2075 - DNA, 23 bp, Homo sapiens
  source 1..23: mol_type = genomic DNA
tactacaacgagagcgaggccgg

SEQ ID NO: 2076 - DNA, 23 bp, Homo sapiens
  source 1..23: mol_type = genomic DNA
tactataaccagagcgaggacgg

SEQ ID NO: 2077 - DNA, 23 bp, Homo sapiens
  source 1..23: mol_type = genomic DNA
tactgcaaccagagcgaggccgg

SEQ ID NO: 2078 - DNA, 23 bp, Homo sapiens
  source 1..23: mol_type = genomic DNA
tacttcatggagtgggaggctgg

SEQ ID NO: 2079 - DNA, 23 bp, Homo sapiens
  source 1..23: mol_type = genomic DNA
tacttctggaaattctttttggg

SEQ ID NO: 2080 - DNA, 23 bp, Homo sapiens
  source 1..23: mol_type = genomic DNA
tagaagtcccaggtcccgggcgg

SEQ ID NO: 2081 - DNA, 23 bp, Homo sapiens
  source 1..23: mol_type = genomic DNA
tagacgacacgcagttcgtgcgg

SEQ ID NO: 2082 - DNA, 23 bp, Homo sapiens
  source 1..23: mol_type = genomic DNA
tagagtgggcaggggggtggtgg

SEQ ID NO: 2083 - DNA, 23 bp, Homo sapiens
  source 1..23: mol_type = genomic DNA
tagagtgggcggggggggggtgg

SEQ ID NO: 2084 - DNA, 23 bp, Homo sapiens
  source 1..23: mol_type = genomic DNA
tagcccacagcgatgaagcgggg

SEQ ID NO: 2085 - DNA, 23 bp, Homo sapiens
  source 1..23: mol_type = genomic DNA
tagcccacggcgatgaagcaggg

SEQ ID NO: 2086 - DNA, 23 bp, Homo sapiens
  source 1..23: mol_type = genomic DNA
tagcccacggtaatgaagcgggg

SEQ ID NO: 2087 - DNA, 23 bp, Homo sapiens
  source 1..23: mol_type = genomic DNA
tagcccactgagacgaagcgggg

SEQ ID NO: 2088 - DNA, 23 bp, Homo sapiens
  source 1..23: mol_type = genomic DNA
tagcgcactgagatgaagcgggg

SEQ ID NO: 2089 - DNA, 23 bp, Homo sapiens
  source 1..23: mol_type = genomic DNA
taggaggaagagttctggtaggg

SEQ ID NO: 2090 - DNA, 23 bp, Homo sapiens
  source 1..23: mol_type = genomic DNA
taggcataatgtgaggagatagg

SEQ ID NO: 2091 - DNA, 23 bp, Homo sapiens
  source 1..23: mol_type = genomic DNA
taggcataatgtgaggagggtgg

SEQ ID NO: 2092 - DNA, 23 bp, Homo sapiens
  source 1..23: mol_type = genomic DNA
tagggaaggggtggggagtgggg

SEQ ID NO: 2093 - DNA, 23 bp, Homo sapiens
  source 1..23: mol_type = genomic DNA
taggtccgagatccgccccgagg

SEQ ID NO: 2094 - DNA, 23 bp, Homo sapiens
  source 1..23: mol_type = genomic DNA
taggttctcacaccgtccagagg

SEQ ID NO: 2095 - DNA, 23 bp, Homo sapiens
  source 1..23: mol_type = genomic DNA
tagtacaaccagagcgaggccgg

SEQ ID NO: 2096 - DNA, 23 bp, Homo sapiens
  source 1..23: mol_type = genomic DNA
tataaccagtacgcctacgacgg

SEQ ID NO: 2097 - DNA, 23 bp, Homo sapiens
  source 1..23: mol_type = genomic DNA
tataaccagttcgcctacgatgg

SEQ ID NO: 2098 - DNA, 23 bp, Homo sapiens
  source 1..23: mol_type = genomic DNA
tatcccaggtgcctgcgtccggg

SEQ ID NO: 2099 - DNA, 23 bp, Homo sapiens
  source 1..23: mol_type = genomic DNA
tatcccaggtgtctgtgtccagg

SEQ ID NO: 2100 - DNA, 23 bp, Homo sapiens
  source 1..23: mol_type = genomic DNA
tatctctgctgttctccagaagg

SEQ ID NO: 2101 - DNA, 23 bp, Homo sapiens
  source 1..23: mol_type = genomic DNA
tatctgcggagccactccacagg

SEQ ID NO: 2102 - DNA, 23 bp, Homo sapiens
  source 1..23: mol_type = genomic DNA
tatgaccagtccgcctaagacgg

SEQ ID NO: 2103 - DNA, 23 bp, Homo sapiens
  source 1..23: mol_type = genomic DNA
tatgaccggtccgcctacgacgg

SEQ ID NO: 2104 - DNA, 23 bp, Homo sapiens
  source 1..23: mol_type = genomic DNA
tatgagcagtatgcctacgacgg

SEQ ID NO: 2105 - DNA, 23 bp, Homo sapiens
  source 1..23: mol_type = genomic DNA
tatgatcagtccgcctacgacgg

SEQ ID NO: 2106 - DNA, 23 bp, Homo sapiens
  source 1..23: mol_type = genomic DNA
tatggccagtccgcctacgacgg

SEQ ID NO: 2107 - DNA, 23 bp, Homo sapiens
  source 1..23: mol_type = genomic DNA
tatggctgcgacgtggggcccgg

SEQ ID NO: 2108 - DNA, 23 bp, Homo sapiens
  source 1..23: mol_type = genomic DNA
tatgtaatccttgccgtcgtagg

SEQ ID NO: 2109 - DNA, 23 bp, Homo sapiens
  source 1..23: mol_type = genomic DNA
tatgtccagtacgcctacgacgg

SEQ ID NO: 2110 - DNA, 23 bp, Homo sapiens
  source 1..23: mol_type = genomic DNA
tatgtcccggcccggccgcgggg

SEQ ID NO: 2111 - DNA, 23 bp, Homo sapiens
  source 1..23: mol_type = genomic DNA
tatttctacaccgccgtgtccgg

SEQ ID NO: 2112 - DNA, 23 bp, Homo sapiens
  source 1..23: mol_type = genomic DNA
tcaagagcccgcaggagacgtgg

SEQ ID NO: 2113 - DNA, 23 bp, Homo sapiens
  source 1..23: mol_type = genomic DNA
tcaccgctaagatgtgtaggagg

SEQ ID NO: 2114 - DNA, 23 bp, Homo sapiens
  source 1..23: mol_type = genomic DNA
tcaccttgatattatggtgttgg

SEQ ID NO: 2115 - DNA, 23 bp, Homo sapiens
  source 1..23: mol_type = genomic DNA
tcacgacccctcattccccacgg

SEQ ID NO: 2116 - DNA, 23 bp, Homo sapiens
  source 1..23: mol_type = genomic DNA
tcactctctggaaacccaggagg

SEQ ID NO: 2117 - DNA, 23 bp, Homo sapiens
  source 1..23: mol_type = genomic DNA
tcacttcttctcccaacttgtgg

SEQ ID NO: 2118 - DNA, 23 bp, Homo sapiens
  source 1..23: mol_type = genomic DNA
tcagagcccgcaggagacgttgg

SEQ ID NO: 2119 - DNA, 23 bp, Homo sapiens
  source 1..23: mol_type = genomic DNA
tcagatcaccaagcacaagtggg

SEQ ID NO: 2120 - DNA, 23 bp, Homo sapiens
  source 1..23: mol_type = genomic DNA
tcagatcacccagcacaagttgg

SEQ ID NO: 2121 - DNA, 23 bp, Homo sapiens
  source 1..23: mol_type = genomic DNA
tcagatcacccagcccaagtggg

SEQ ID NO: 2122 - DNA, 23 bp, Homo sapiens
  source 1..23: mol_type = genomic DNA
tcagatcacccagcccaagttgg

SEQ ID NO: 2123 - DNA, 23 bp, Homo sapiens
  source 1..23: mol_type = genomic DNA
tcagatcacccagcgcaaatggg

SEQ ID NO: 2124 - DNA, 23 bp, Homo sapiens
  source 1..23: mol_type = genomic DNA
tcagatcacccagcgtaagtggg

SEQ ID NO: 2125 - DNA, 23 bp, Homo sapiens
  source 1..23: mol_type = genomic DNA
tcagatcaccgagcgcaagtggg

SEQ ID NO: 2126 - DNA, 23 bp, Homo sapiens
  source 1..23: mol_type = genomic DNA
tcagatcactcagcgcaagttgg

SEQ ID NO: 2127 - DNA, 23 bp, Homo sapiens
  source 1..23: mol_type = genomic DNA
tcagatcatccagcgcaagtggg

SEQ ID NO: 2128 - DNA, 23 bp, Homo sapiens
  source 1..23: mol_type = genomic DNA
tcagattacccagcgcaagttgg

SEQ ID NO: 2129 - DNA, 23 bp, Homo sapiens
  source 1..23: mol_type = genomic DNA
tcaggcagtgacagtgcccaggg

SEQ ID NO: 2130 - DNA, 23 bp, Homo sapiens
  source 1..23: mol_type = genomic DNA
tcagggactagaattctccacgg

SEQ ID NO: 2131 - DNA, 23 bp, Homo sapiens
  source 1..23: mol_type = genomic DNA
tcagggtggcttcatggtcaggg

SEQ ID NO: 2132 - DNA, 23 bp, Homo sapiens
  source 1..23: mol_type = genomic DNA
tcagtccgcctacgacggcaagg

SEQ ID NO: 2133 - DNA, 23 bp, Homo sapiens
  source 1..23: mol_type = genomic DNA
tcatcccattttccattcaaggg

SEQ ID NO: 2134 - DNA, 23 bp, Homo sapiens
  source 1..23: mol_type = genomic DNA
tcatgactattgtgttctgtagg

SEQ ID NO: 2135 - DNA, 23 bp, Homo sapiens
  source 1..23: mol_type = genomic DNA
tcatgtttcctgatcccgcctgg

SEQ ID NO: 2136 - DNA, 23 bp, Homo sapiens
  source 1..23: mol_type = genomic DNA
tcattccccacggacgggccggg

SEQ ID NO: 2137 - DNA, 23 bp, Homo sapiens
  source 1..23: mol_type = genomic DNA
tcattcggtcagtctgtgcctgg

SEQ ID NO: 2138 - DNA, 23 bp, Homo sapiens
  source 1..23: mol_type = genomic DNA
tcattttcctcccctcctcgtgg

SEQ ID NO: 2139 - DNA, 23 bp, Homo sapiens
  source 1..23: mol_type = genomic DNA
tccactcaggtcaggaccagagg

SEQ ID NO: 2140 - DNA, 23 bp, Homo sapiens
  source 1..23: mol_type = genomic DNA
tcccaggctcccactccatgagg

SEQ ID NO: 2141 - DNA, 23 bp, Homo sapiens
  source 1..23: mol_type = genomic DNA
tcccaggtgcctgcgtccgctgg

SEQ ID NO: 2142 - DNA, 23 bp, Homo sapiens
  source 1..23: mol_type = genomic DNA
tcccattctccaggtatctgcgg

SEQ ID NO: 2143 - DNA, 23 bp, Homo sapiens
  source 1..23: mol_type = genomic DNA
tcccattcttcaggtgtctgcgg

SEQ ID NO: 2144 - DNA, 23 bp, Homo sapiens
  source 1..23: mol_type = genomic DNA
tcccattttccattcaagggagg

SEQ ID NO: 2145 - DNA, 23 bp, Homo sapiens
  source 1..23: mol_type = genomic DNA
tccccctggttggtcggggccgg

SEQ ID NO: 2146 - DNA, 23 bp, Homo sapiens
  source 1..23: mol_type = genomic DNA
tcccgttccccaggtatctgcgg

SEQ ID NO: 2147 - DNA, 23 bp, Homo sapiens
  source 1..23: mol_type = genomic DNA
tcccgttctccagatatctgcgg

SEQ ID NO: 2148 - DNA, 23 bp, Homo sapiens
  source 1..23: mol_type = genomic DNA
tccctccttaacccatctcaggg

SEQ ID NO: 2149 - DNA, 23 bp, Homo sapiens
  source 1..23: mol_type = genomic DNA
tccctccttatcccatctcaggg

SEQ ID NO: 2150 - DNA, 23 bp, Homo sapiens
  source 1..23: mol_type = genomic DNA
tccctttctccaggtatctgcgg

SEQ ID NO: 2151 - DNA, 23 bp, Homo sapiens
  source 1..23: mol_type = genomic DNA
tccctttcttcaggtatctgcgg

SEQ ID NO: 2152 - DNA, 23 bp, Homo sapiens
  source 1..23: mol_type = genomic DNA
tccgcagacacctgaagaatggg

SEQ ID NO: 2153 - DNA, 23 bp, Homo sapiens
  source 1..23: mol_type = genomic DNA
tccgcagacacctggagaacagg

SEQ ID NO: 2154 - DNA, 23 bp, Homo sapiens
  source 1..23: mol_type = genomic DNA
tccgcagatacctgaagaaaggg

SEQ ID NO: 2155 - DNA, 23 bp, Homo sapiens
  source 1..23: mol_type = genomic DNA
tccgcagatacctggagaaaggg

SEQ ID NO: 2156 - DNA, 23 bp, Homo sapiens
  source 1..23: mol_type = genomic DNA
tccgcagatacctggagaaccgg

SEQ ID NO: 2157 - DNA, 23 bp, Homo sapiens
  source 1..23: mol_type = genomic DNA
tccgcagatacctggagaatggg

SEQ ID NO: 2158 - DNA, 23 bp, Homo sapiens
  source 1..23: mol_type = genomic DNA
tccgcagatacctggggaacggg

SEQ ID NO: 2159 - DNA, 23 bp, Homo sapiens
  source 1..23: mol_type = genomic DNA
tccgcagatatctggagaacggg

SEQ ID NO: 2160 - DNA, 23 bp, Homo sapiens
  source 1..23: mol_type = genomic DNA
tccgccgcgtccaggagcgcagg

SEQ ID NO: 2161 - DNA, 23 bp, Homo sapiens
  source 1..23: mol_type = genomic DNA
tccgcggccgggccaggacacgg

SEQ ID NO: 2162 - DNA, 23 bp, Homo sapiens
  source 1..23: mol_type = genomic DNA
tccgcggccgggcccggacacgg

SEQ ID NO: 2163 - DNA, 23 bp, Homo sapiens
  source 1..23: mol_type = genomic DNA
tccgcggcctggccgggacacgg

SEQ ID NO: 2164 - DNA, 23 bp, Homo sapiens
  source 1..23: mol_type = genomic DNA
tccggcccctcctccacccacgg

SEQ ID NO: 2165 - DNA, 23 bp, Homo sapiens
  source 1..23: mol_type = genomic DNA
tccggttctccaggtatctgcgg

SEQ ID NO: 2166 - DNA, 23 bp, Homo sapiens
  source 1..23: mol_type = genomic DNA
tccgtgtcccggcccggcagcgg

SEQ ID NO: 2167 - DNA, 23 bp, Homo sapiens
  source 1..23: mol_type = genomic DNA
tcctaccggcgcggctccccggg

SEQ ID NO: 2168 - DNA, 23 bp, Homo sapiens
  source 1..23: mol_type = genomic DNA
tcctccacccacggcgcccgcgg

SEQ ID NO: 2169 - DNA, 23 bp, Homo sapiens
  source 1..23: mol_type = genomic DNA
tcctcccctttgtgacttcaagg

SEQ ID NO: 2170 - DNA, 23 bp, Homo sapiens
  source 1..23: mol_type = genomic DNA
tcctccctgcgccgctccccggg

SEQ ID NO: 2171 - DNA, 23 bp, Homo sapiens
  source 1..23: mol_type = genomic DNA
tcctccctgcgcggcttcccggg

SEQ ID NO: 2172 - DNA, 23 bp, Homo sapiens
  source 1..23: mol_type = genomic DNA
tcctgaagatctgtgtgttccgg

SEQ ID NO: 2173 - DNA, 23 bp, Homo sapiens
  source 1..23: mol_type = genomic DNA
tcctgacctgcgccaccggccgg

SEQ ID NO: 2174 - DNA, 23 bp, Homo sapiens
  source 1..23: mol_type = genomic DNA
tcctgtccaacgtctcctgcggg

SEQ ID NO: 2175 - DNA, 23 bp, Homo sapiens
  source 1..23: mol_type = genomic DNA
tcctgttctccaggtgtctgcgg

SEQ ID NO: 2176 - DNA, 23 bp, Homo sapiens
  source 1..23: mol_type = genomic DNA
tcgacgggcgcctcctccgcggg

SEQ ID NO: 2177 - DNA, 23 bp, Homo sapiens
  source 1..23: mol_type = genomic DNA
tcgccctccctctggtcttgagg

SEQ ID NO: 2178 - DNA, 23 bp, Homo sapiens
  source 1..23: mol_type = genomic DNA
tcgcctggtctccacaagctcgg

SEQ ID NO: 2179 - DNA, 23 bp, Homo sapiens
  source 1..23: mol_type = genomic DNA
tcgcttgtaaggtgagattctgg

SEQ ID NO: 2180 - DNA, 23 bp, Homo sapiens
  source 1..23: mol_type = genomic DNA
tcggacgggcgcctcctccgcgg

SEQ ID NO: 2181 - DNA, 23 bp, Homo sapiens
  source 1..23: mol_type = genomic DNA
tcgggccactcctcgcccccagg

SEQ ID NO: 2182 - DNA, 23 bp, Homo sapiens
  source 1..23: mol_type = genomic DNA
tcgggcccctcctcgcccccagg

SEQ ID NO: 2183 - DNA, 23 bp, Homo sapiens
  source 1..23: mol_type = genomic DNA
tcggggctggggcggggttcggg

SEQ ID NO: 2184 - DNA, 23 bp, Homo sapiens
  source 1..23: mol_type = genomic DNA
tcgggggaaggtccctgctaagg

SEQ ID NO: 2185 - DNA, 23 bp, Homo sapiens
  source 1..23: mol_type = genomic DNA
tcgggggacggggctggccgcgg

SEQ ID NO: 2186 - DNA, 23 bp, Homo sapiens
  source 1..23: mol_type = genomic DNA
tcgggggactgggctgaccacgg

SEQ ID NO: 2187 - DNA, 23 bp, Homo sapiens
  source 1..23: mol_type = genomic DNA
tcgggggctgggctgaccgcggg

SEQ ID NO: 2188 - DNA, 23 bp, Homo sapiens
  source 1..23: mol_type = genomic DNA
tcggtaaggagggggatgagggg

SEQ ID NO: 2189 - DNA, 23 bp, Homo sapiens
  source 1..23: mol_type = genomic DNA
tcgtggagaccaggcctgccagg

SEQ ID NO: 2190 - DNA, 23 bp, Homo sapiens
  source 1..23: mol_type = genomic DNA
tcgtggaggccaggcctgcaggg

SEQ ID NO: 2191 - DNA, 23 bp, Homo sapiens
  source 1..23: mol_type = genomic DNA
tcgtgtcccggcccggccgcggg

SEQ ID NO: 2192 - DNA, 23 bp, Homo sapiens
  source 1..23: mol_type = genomic DNA
tctaccctgcggagatcacacgg

SEQ ID NO: 2193 - DNA, 23 bp, Homo sapiens
  source 1..23: mol_type = genomic DNA
tctcaactgctccgcctcacggg

SEQ ID NO: 2194 - DNA, 23 bp, Homo sapiens
  source 1..23: mol_type = genomic DNA
tctcaactgctcctccacacggg

SEQ ID NO: 2195 - DNA, 23 bp, Homo sapiens
  source 1..23: mol_type = genomic DNA
tctcaactgctctgccacacggg

SEQ ID NO: 2196 - DNA, 23 bp, Homo sapiens
  source 1..23: mol_type = genomic DNA
tctcacatccagaggatgtacgg

SEQ ID NO: 2197 - DNA, 23 bp, Homo sapiens
  source 1..23: mol_type = genomic DNA
tctcactccaattgggtgtcggg

SEQ ID NO: 2198 - DNA, 23 bp, Homo sapiens
  source 1..23: mol_type = genomic DNA
tctcactcccatcgggtgtcggg

SEQ ID NO: 2199 - DNA, 23 bp, Homo sapiens
  source 1..23: mol_type = genomic DNA
tctcactcctattgggtgtcggg

SEQ ID NO: 2200 - DNA, 23 bp, Homo sapiens
  source 1..23: mol_type = genomic DNA
tctcagccactgctcgccccagg

SEQ ID NO: 2201 - DNA, 23 bp, Homo sapiens
  source 1..23: mol_type = genomic DNA
tctcagctgctccgccacatggg

SEQ ID NO: 2202 - DNA, 23 bp, Homo sapiens
  source 1..23: mol_type = genomic DNA
tctcagctgctccgccacccggg

SEQ ID NO: 2203 - DNA, 23 bp, Homo sapiens
  source 1..23: mol_type = genomic DNA
tctcagctgctccgccccacggg

SEQ ID NO: 2204 - DNA, 23 bp, Homo sapiens
  source 1..23: mol_type = genomic DNA
tctcagctgctcggccgcacggg

SEQ ID NO: 2205 - DNA, 23 bp, Homo sapiens
  source 1..23: mol_type = genomic DNA
tctccacagggtagaaacccagg

SEQ ID NO: 2206 - DNA, 23 bp, Homo sapiens
  source 1..23: mol_type = genomic DNA
tctccacagggtagaagcccagg

SEQ ID NO: 2207 - DNA, 23 bp, Homo sapiens
  source 1..23: mol_type = genomic DNA
tctccacagggtagaagctcagg

SEQ ID NO: 2208 - DNA, 23 bp, Homo sapiens
  source 1..23: mol_type = genomic DNA
tctcccccagacgccgaggatgg

SEQ ID NO: 2209 - DNA, 23 bp, Homo sapiens
  source 1..23: mol_type = genomic DNA
tctccctcaagaccagagggagg

SEQ ID NO: 2210 - DNA, 23 bp, Homo sapiens
  source 1..23: mol_type = genomic DNA
tctccgcagggtagaagcacagg

SEQ ID NO: 2211 - DNA, 23 bp, Homo sapiens
  source 1..23: mol_type = genomic DNA
tctccgctgctcccgccgcatgg

SEQ ID NO: 2212 - DNA, 23 bp, Homo sapiens
  source 1..23: mol_type = genomic DNA
tctccgctgctccgcccgacggg

SEQ ID NO: 2213 - DNA, 23 bp, Homo sapiens
  source 1..23: mol_type = genomic DNA
tctccgctgctccgcctcacagg

SEQ ID NO: 2214 - DNA, 23 bp, Homo sapiens
  source 1..23: mol_type = genomic DNA
tctccgctgctccgcctcaccgg

SEQ ID NO: 2215 - DNA, 23 bp, Homo sapiens
  source 1..23: mol_type = genomic DNA
tctccgttgctccgcctcacggg

SEQ ID NO: 2216 - DNA, 23 bp, Homo sapiens
  source 1..23: mol_type = genomic DNA
tctcctgcgggctcttgaccagg

SEQ ID NO: 2217 - DNA, 23 bp, Homo sapiens
  source 1..23: mol_type = genomic DNA
tctcggagccccgcggcttcggg

SEQ ID NO: 2218 - DNA, 23 bp, Homo sapiens
  source 1..23: mol_type = genomic DNA
tctcgttgtagtagccgcgcagg

SEQ ID NO: 2219 - DNA, 23 bp, Homo sapiens
  source 1..23: mol_type = genomic DNA
tctctaggacaattaagggatgg

SEQ ID NO: 2220 - DNA, 23 bp, Homo sapiens
  source 1..23: mol_type = genomic DNA
tctctccgtcagtctgtgcctgg

SEQ ID NO: 2221 - DNA, 23 bp, Homo sapiens
  source 1..23: mol_type = genomic DNA
tctctcggtcagtctgtgatggg

SEQ ID NO: 2222 - DNA, 23 bp, Homo sapiens
  source 1..23: mol_type = genomic DNA
tctctgctgctccgccacacggg

SEQ ID NO: 2223 - DNA, 23 bp, Homo sapiens
  source 1..23: mol_type = genomic DNA
tctctgctgctccgcctcatggg

SEQ ID NO: 2224 - DNA, 23 bp, Homo sapiens
  source 1..23: mol_type = genomic DNA
tctgagccgccgtgtccgccagg

SEQ ID NO: 2225 - DNA, 23 bp, Homo sapiens
  source 1..23: mol_type = genomic DNA
tctgcactgctccgcctcacggg

SEQ ID NO: 2226 - DNA, 23 bp, Homo sapiens
  source 1..23: mol_type = genomic DNA
tctgccccacactcagtgtttgg

SEQ ID NO: 2227 - DNA, 23 bp, Homo sapiens
  source 1..23: mol_type = genomic DNA
tctgcggtcgaggttctgggcgg

SEQ ID NO: 2228 - DNA, 23 bp, Homo sapiens
  source 1..23: mol_type = genomic DNA
tctgcgttcctggaccgccgcgg

SEQ ID NO: 2229 - DNA, 23 bp, Homo sapiens
  source 1..23: mol_type = genomic DNA
tctgctcctgatctgagtagagg

SEQ ID NO: 2230 - DNA, 23 bp, Homo sapiens
  source 1..23: mol_type = genomic DNA
tctgctgtctaggacaattaagg

SEQ ID NO: 2231 - DNA, 23 bp, Homo sapiens
  source 1..23: mol_type = genomic DNA
tctggaaacccgacacccgatgg

SEQ ID NO: 2232 - DNA, 23 bp, Homo sapiens
  source 1..23: mol_type = genomic DNA
tctgggaaaaggggaaggtgagg

SEQ ID NO: 2233 - DNA, 23 bp, Homo sapiens
  source 1..23: mol_type = genomic DNA
tctggggggggggggggcagagg

SEQ ID NO: 2234 - DNA, 23 bp, Homo sapiens
  source 1..23: mol_type = genomic DNA
tctgggttttgttgtcccactgg

SEQ ID NO: 2235 - DNA, 23 bp, Homo sapiens
  source 1..23: mol_type = genomic DNA
tctggtagggaaggggtgagggg

SEQ ID NO: 2236 - DNA, 23 bp, Homo sapiens
  source 1..23: mol_type = genomic DNA
tctggttatagtagccgcgcagg

SEQ ID NO: 2237 - DNA, 23 bp, Homo sapiens
  source 1..23: mol_type = genomic DNA
tctggttgcagtagccgcgcagg

SEQ ID NO: 2238 - DNA, 23 bp, Homo sapiens
  source 1..23: mol_type = genomic DNA
tctggttgtactagccgcgcagg

SEQ ID NO: 2239 - DNA, 23 bp, Homo sapiens
  source 1..23: mol_type = genomic DNA
tctggttgtagtacccgcgcagg

SEQ ID NO: 2240 - DNA, 23 bp, Homo sapiens
  source 1..23: mol_type = genomic DNA
tctggttgtagtagccaagcagg

SEQ ID NO: 2241 - DNA, 23 bp, Homo sapiens
  source 1..23: mol_type = genomic DNA
tctggttgtagtagccgtgcagg

SEQ ID NO: 2242 - DNA, 23 bp, Homo sapiens
  source 1..23: mol_type = genomic DNA
tctggttgtagtggccgcgcagg

SEQ ID NO: 2243 - DNA, 23 bp, Homo sapiens
  source 1..23: mol_type = genomic DNA
tctgtcctgctccgccatacggg

SEQ ID NO: 2244 - DNA, 23 bp, Homo sapiens
  source 1..23: mol_type = genomic DNA
tctgtgtccaggctggtgtctgg

SEQ ID NO: 2245 - DNA, 23 bp, Homo sapiens
  source 1..23: mol_type = genomic DNA
tctgttcctgatctgagtggagg

SEQ ID NO: 2246 - DNA, 23 bp, Homo sapiens
  source 1..23: mol_type = genomic DNA
tcttagctgctccgccacacggg

SEQ ID NO: 2247 - DNA, 23 bp, Homo sapiens
  source 1..23: mol_type = genomic DNA
tcttctccctcaagaccagaggg

SEQ ID NO: 2248 - DNA, 23 bp, Homo sapiens
  source 1..23: mol_type = genomic DNA
tcttgaagatctgtgtctcccgg

SEQ ID NO: 2249 - DNA, 23 bp, Homo sapiens
  source 1..23: mol_type = genomic DNA
tcttgaagatctgtgtgttcggg

SEQ ID NO: 2250 - DNA, 23 bp, Homo sapiens
  source 1..23: mol_type = genomic DNA
tcttgcagatctgtgtctcccgg

SEQ ID NO: 2251 - DNA, 23 bp, Homo sapiens
  source 1..23: mol_type = genomic DNA
tcttggagatctctgtctcccgg

SEQ ID NO: 2252 - DNA, 23 bp, Homo sapiens
  source 1..23: mol_type = genomic DNA
tcttggggtctagagtgggcagg

SEQ ID NO: 2253 - DNA, 23 bp, Homo sapiens
  source 1..23: mol_type = genomic DNA
tgaaaatgaaaccgggttaaagg

SEQ ID NO: 2254 - DNA, 23 bp, Homo sapiens
  source 1..23: mol_type = genomic DNA
tgaaaccgggtaaaggcacctgg

SEQ ID NO: 2255 - DNA, 23 bp, Homo sapiens
  source 1..23: mol_type = genomic DNA
tgaaaccgggtaaagtcgcctgg

SEQ ID NO: 2256 - DNA, 23 bp, Homo sapiens
  source 1..23: mol_type = genomic DNA
tgaaagacgacctgcgctcttgg

SEQ ID NO: 2257 - DNA, 23 bp, Homo sapiens
  source 1..23: mol_type = genomic DNA
tgaacgaggacctaagctcctgg

SEQ ID NO: 2258 - DNA, 23 bp, Homo sapiens
  source 1..23: mol_type = genomic DNA
tgaacgaggacctgagctcccgg

SEQ ID NO: 2259 - DNA, 23 bp, Homo sapiens
  source 1..23: mol_type = genomic DNA
tgaacgaggacctgccctcctgg

SEQ ID NO: 2260 - DNA, 23 bp, Homo sapiens
  source 1..23: mol_type = genomic DNA
tgaacgaggatctgcgttcctgg

SEQ ID NO: 2261 - DNA, 23 bp, Homo sapiens
  source 1..23: mol_type = genomic DNA
tgacatctctgaggaaatggagg

SEQ ID NO: 2262 - DNA, 23 bp, Homo sapiens
  source 1..23: mol_type = genomic DNA
tgaccgcgagggctgggccaggg

SEQ ID NO: 2263 - DNA, 23 bp, Homo sapiens
  source 1..23: mol_type = genomic DNA
tgaccgcggggcctaggccaggg

SEQ ID NO: 2264 - DNA, 23 bp, Homo sapiens
  source 1..23: mol_type = genomic DNA
tgaccgcggggtccgggccaggg

SEQ ID NO: 2265 - DNA, 23 bp, Homo sapiens
  source 1..23: mol_type = genomic DNA
tgacctgagtggaggctgagggg

SEQ ID NO: 2266 - DNA, 23 bp, Homo sapiens
  source 1..23: mol_type = genomic DNA
tgacggccattctcggcgtctgg

SEQ ID NO: 2267 - DNA, 23 bp, Homo sapiens
  source 1..23: mol_type = genomic DNA
tgactcatgatgctggaatcagg

SEQ ID NO: 2268 - DNA, 23 bp, Homo sapiens
  source 1..23: mol_type = genomic DNA
tgactggggactttagaacctgg

SEQ ID NO: 2269 - DNA, 23 bp, Homo sapiens
  source 1..23: mol_type = genomic DNA
tgactggtgactttagaaccggg

SEQ ID NO: 2270 - DNA, 23 bp, Homo sapiens
  source 1..23: mol_type = genomic DNA
tgactttagaaccgggactgcgg

SEQ ID NO: 2271 - DNA, 23 bp, Homo sapiens
  source 1..23: mol_type = genomic DNA
tgagagcctacctggagggccgg

SEQ ID NO: 2272 - DNA, 23 bp, Homo sapiens
  source 1..23: mol_type = genomic DNA
tgagatcccagaaaggagtcagg

SEQ ID NO: 2273 - DNA, 23 bp, Homo sapiens
  source 1..23: mol_type = genomic DNA
tgagctcctggcggacacggcgg

SEQ ID NO: 2274 - DNA, 23 bp, Homo sapiens
  source 1..23: mol_type = genomic DNA
tgagcttgtggagaccagaccgg

SEQ ID NO: 2275 - DNA, 23 bp, Homo sapiens
  source 1..23: mol_type = genomic DNA
tgaggcctgcgccccgggccggg

SEQ ID NO: 2276 - DNA, 23 bp, Homo sapiens
  source 1..23: mol_type = genomic DNA
tgagggagaagaatcctcctggg

SEQ ID NO: 2277 - DNA, 23 bp, Homo sapiens
  source 1..23: mol_type = genomic DNA
tgaggggcttcggtaaggagggg

SEQ ID NO: 2278 - DNA, 23 bp, Homo sapiens
  source 1..23: mol_type = genomic DNA
tgagtatgaggcagagaacaagg

SEQ ID NO: 2279 - DNA, 23 bp, Homo sapiens
  source 1..23: mol_type = genomic DNA
tgagtctctcatcgcttgtaagg

SEQ ID NO: 2280 - DNA, 23 bp, Homo sapiens
  source 1..23: mol_type = genomic DNA
tgagtgtgaagcagagaacaggg

SEQ ID NO: 2281 - DNA, 23 bp, Homo sapiens
  source 1..23: mol_type = genomic DNA
tgagtgtgaagcagagaacgagg

SEQ ID NO: 2282 - DNA, 23 bp, Homo sapiens
  source 1..23: mol_type = genomic DNA
tgagtgtggggcagagaacaagg

SEQ ID NO: 2283 - DNA, 23 bp, Homo sapiens
  source 1..23: mol_type = genomic DNA
tgatcgcctgtagatctccgggg

SEQ ID NO: 2284 - DNA, 23 bp, Homo sapiens
  source 1..23: mol_type = genomic DNA
tgatgccggtgggcgtgtggagg

SEQ ID NO: 2285 - DNA, 23 bp, Homo sapiens
  source 1..23: mol_type = genomic DNA
tgatggccatcctcggcgtctgg

SEQ ID NO: 2286 - DNA, 23 bp, Homo sapiens
  source 1..23: mol_type = genomic DNA
tgatggcggtggccgtgtggagg

SEQ ID NO: 2287 - DNA, 23 bp, Homo sapiens
  source 1..23: mol_type = genomic DNA
tgatgggggtgggagtgtgaagg

SEQ ID NO: 2288 - DNA, 23 bp, Homo sapiens
  source 1..23: mol_type = genomic DNA
tgattccagcatcatgagtcagg

SEQ ID NO: 2289 - DNA, 23 bp, Homo sapiens
  source 1..23: mol_type = genomic DNA
tgattccagcattcatgagtcgg

SEQ ID NO: 2290 - DNA, 23 bp, Homo sapiens
  source 1..23: mol_type = genomic DNA
tgcagccacacatccactggagg

SEQ ID NO: 2291 - DNA, 23 bp, Homo sapiens
  source 1..23: mol_type = genomic DNA
tgcatgtaagtgatggcggtggg

SEQ ID NO: 2292 - DNA, 23 bp, Homo sapiens
  source 1..23: mol_type = genomic DNA
tgccccacactcagtgtttgggg

SEQ ID NO: 2293 - DNA, 23 bp, Homo sapiens
  source 1..23: mol_type = genomic DNA
tgcccggccccgaccaaccaggg

SEQ ID NO: 2294 - DNA, 23 bp, Homo sapiens
  source 1..23: mol_type = genomic DNA
tgccgtcgtaggcgaactggtgg

SEQ ID NO: 2295 - DNA, 23 bp, Homo sapiens
  source 1..23: mol_type = genomic DNA
tgccgtcgtaggcgacctgccgg

SEQ ID NO: 2296 - DNA, 23 bp, Homo sapiens
  source 1..23: mol_type = genomic DNA
tgccgtcgtaggcgtagtggtgg

SEQ ID NO: 2297 - DNA, 23 bp, Homo sapiens
  source 1..23: mol_type = genomic DNA
tgccgtcgtaggcgtgctgccgg

SEQ ID NO: 2298 - DNA, 23 bp, Homo sapiens
  source 1..23: mol_type = genomic DNA
tgccgtcttaggcgtcctgccgg

SEQ ID NO: 2299 - DNA, 23 bp, Homo sapiens
  source 1..23: mol_type = genomic DNA
tgcctgcgtccgctggtgtctgg

SEQ ID NO: 2300 - DNA, 23 bp, Homo sapiens
  source 1..23: mol_type = genomic DNA
tgccttcgtaggcgtcctgccgg

SEQ ID NO: 2301 - DNA, 23 bp, Homo sapiens
  source 1..23: mol_type = genomic DNA
tgcggagccactccacacacagg

SEQ ID NO: 2302 - DNA, 23 bp, Homo sapiens
  source 1..23: mol_type = genomic DNA
tgcggagccactcctcgcacagg

SEQ ID NO: 2303 - DNA, 23 bp, Homo sapiens
  source 1..23: mol_type = genomic DNA
tgcggagcgaccccacgcacagg

SEQ ID NO: 2304 - DNA, 23 bp, Homo sapiens
  source 1..23: mol_type = genomic DNA
tgcgtccagcgacagtgcccagg

SEQ ID NO: 2305 - DNA, 23 bp, Homo sapiens
  source 1..23: mol_type = genomic DNA
tgcgtgtaaatgatggcggcggg

SEQ ID NO: 2306 - DNA, 23 bp, Homo sapiens
  source 1..23: mol_type = genomic DNA
tgcgtgtaagtgatgccggtggg

SEQ ID NO: 2307 - DNA, 23 bp, Homo sapiens
  source 1..23: mol_type = genomic DNA
tgctccacccacggcgcctgcgg

SEQ ID NO: 2308 - DNA, 23 bp, Homo sapiens
  source 1..23: mol_type = genomic DNA
tgctccatccacggctcccgcgg

SEQ ID NO: 2309 - DNA, 23 bp, Homo sapiens
  source 1..23: mol_type = genomic DNA
tgctctatccaccgcgcccgcgg

SEQ ID NO: 2310 - DNA, 23 bp, Homo sapiens
  source 1..23: mol_type = genomic DNA
tgctctatccagggcgcccgcgg

SEQ ID NO: 2311 - DNA, 23 bp, Homo sapiens
  source 1..23: mol_type = genomic DNA
tgctctatccatggctcccgggg

SEQ ID NO: 2312 - DNA, 23 bp, Homo sapiens
  source 1..23: mol_type = genomic DNA
tgctgcagcgcacgggtaccagg

SEQ ID NO: 2313 - DNA, 23 bp, Homo sapiens
  source 1..23: mol_type = genomic DNA
tgctggcctggctgtccttgtgg

SEQ ID NO: 2314 - DNA, 23 bp, Homo sapiens
  source 1..23: mol_type = genomic DNA
tggaaccttccagaagtgggagg

SEQ ID NO: 2315 - DNA, 23 bp, Homo sapiens
  source 1..23: mol_type = genomic DNA
tggaagcctgggggcgaggaggg

SEQ ID NO: 2316 - DNA, 23 bp, Homo sapiens
  source 1..23: mol_type = genomic DNA
tggaaggttctatctcctgcagg

SEQ ID NO: 2317 - DNA, 23 bp, Homo sapiens
  source 1..23: mol_type = genomic DNA
tggaaggttctatctcctgccgg

SEQ ID NO: 2318 - DNA, 23 bp, Homo sapiens
  source 1..23: mol_type = genomic DNA
tggacctggggaccctgcgcggg

SEQ ID NO: 2319 - DNA, 23 bp, Homo sapiens
  source 1..23: mol_type = genomic DNA
tggacgacaagcagttcgtgagg

SEQ ID NO: 2320 - DNA, 23 bp, Homo sapiens
  source 1..23: mol_type = genomic DNA
tggacgacacgcacttcgtgcgg

SEQ ID NO: 2321 - DNA, 23 bp, Homo sapiens
  source 1..23: mol_type = genomic DNA
tggacgacacgcagttagtgcgg

SEQ ID NO: 2322 - DNA, 23 bp, Homo sapiens
  source 1..23: mol_type = genomic DNA
tggacgacacgcagttcatgagg

SEQ ID NO: 2323 - DNA, 23 bp, Homo sapiens
  source 1..23: mol_type = genomic DNA
tggacgacacgcagtttgtgcgg

SEQ ID NO: 2324 - DNA, 23 bp, Homo sapiens
  source 1..23: mol_type = genomic DNA
tggacgacacgctgttcatgagg

SEQ ID NO: 2325 - DNA, 23 bp, Homo sapiens
  source 1..23: mol_type = genomic DNA
tggacgacacgctgttggtgagg

SEQ ID NO: 2326 - DNA, 23 bp, Homo sapiens
  source 1..23: mol_type = genomic DNA
tggacgaggacctgcgctcctgg

SEQ ID NO: 2327 - DNA, 23 bp, Homo sapiens
  source 1..23: mol_type = genomic DNA
tggacgatacgcagttcgtgcgg

SEQ ID NO: 2328 - DNA, 23 bp, Homo sapiens
  source 1..23: mol_type = genomic DNA
tggactgcggagacgctgattgg

SEQ ID NO: 2329 - DNA, 23 bp, Homo sapiens
  source 1..23: mol_type = genomic DNA
tggactgggaagacggctccggg

SEQ ID NO: 2330 - DNA, 23 bp, Homo sapiens
  source 1..23: mol_type = genomic DNA
tggagaaacacctcatggagtgg

SEQ ID NO: 2331 - DNA, 23 bp, Homo sapiens
  source 1..23: mol_type = genomic DNA
tggagaaatacgtcatggagtgg

SEQ ID NO: 2332 - DNA, 23 bp, Homo sapiens
  source 1..23: mol_type = genomic DNA
tggagcccctcaccctgagatgg

SEQ ID NO: 2333 - DNA, 23 bp, Homo sapiens
  source 1..23: mol_type = genomic DNA
tggagcccttcagcagggtcggg

SEQ ID NO: 2334 - DNA, 23 bp, Homo sapiens
  source 1..23: mol_type = genomic DNA
tggagccgcgagccagaggatgg

SEQ ID NO: 2335 - DNA, 23 bp, Homo sapiens
  source 1..23: mol_type = genomic DNA
tggaggacacgtgcgtggagtgg

SEQ ID NO: 2336 - DNA, 23 bp, Homo sapiens
  source 1..23: mol_type = genomic DNA
tggaggaggggccggagtattgg

SEQ ID NO: 2337 - DNA, 23 bp, Homo sapiens
  source 1..23: mol_type = genomic DNA
tggagggaacgtgcgtggagtgg

SEQ ID NO: 2338 - DNA, 23 bp, Homo sapiens
  source 1..23: mol_type = genomic DNA
tggagggcaagtgcgtggagtgg

SEQ ID NO: 2339 - DNA, 23 bp, Homo sapiens
  source 1..23: mol_type = genomic DNA
tggagggcacgcgcgtggagtgg

SEQ ID NO: 2340 - DNA, 23 bp, Homo sapiens
  source 1..23: mol_type = genomic DNA
tggagggcacgtacgtggagtgg

SEQ ID NO: 2341 - DNA, 23 bp, Homo sapiens
  source 1..23: mol_type = genomic DNA
tggagggcacgtgagtggagtgg

SEQ ID NO: 2342 - DNA, 23 bp, Homo sapiens
  source 1..23: mol_type = genomic DNA
tggagggcacgtgcatggagtgg

SEQ ID NO: 2343 - DNA, 23 bp, Homo sapiens
  source 1..23: mol_type = genomic DNA
tggagggcacgtgcgtggtgtgg

SEQ ID NO: 2344 - DNA, 23 bp, Homo sapiens
  source 1..23: mol_type = genomic DNA
tggagggcacgtgtgtggagtgg

SEQ ID NO: 2345 - DNA, 23 bp, Homo sapiens
  source 1..23: mol_type = genomic DNA
tggagggcacgttcgtggagtgg

SEQ ID NO: 2346 - DNA, 23 bp, Homo sapiens
  source 1..23: mol_type = genomic DNA
tggagggcctgtgcgaggagtgg

SEQ ID NO: 2347 - DNA, 23 bp, Homo sapiens
  source 1..23: mol_type = genomic DNA
tggagggcctgtgtgtggagtgg

SEQ ID NO: 2348 - DNA, 23 bp, Homo sapiens
  source 1..23: mol_type = genomic DNA
tggagggcgagttcgtggagtgg

SEQ ID NO: 2349 - DNA, 23 bp, Homo sapiens
  source 1..23: mol_type = genomic DNA
tggatgtgagaccctggccccgg

SEQ ID NO: 2350 - DNA, 23 bp, Homo sapiens
  source 1..23: mol_type = genomic DNA
tggatgtgtggctgcaacctggg

SEQ ID NO: 2351 - DNA, 23 bp, Homo sapiens
  source 1..23: mol_type = genomic DNA
tggatgtttggctgcgaccttgg

SEQ ID NO: 2352 - DNA, 23 bp, Homo sapiens
  source 1..23: mol_type = genomic DNA
tggccgcggggccggggccaggg

SEQ ID NO: 2353 - DNA, 23 bp, Homo sapiens
  source 1..23: mol_type = genomic DNA
tggcctcccacgaggaagggagg

SEQ ID NO: 2354 - DNA, 23 bp, Homo sapiens
  source 1..23: mol_type = genomic DNA
tggcctggtctccacaagctggg

SEQ ID NO: 2355 - DNA, 23 bp, Homo sapiens
  source 1..23: mol_type = genomic DNA
tggcgggtctggggggggggggg

SEQ ID NO: 2356 - DNA, 23 bp, Homo sapiens
  source 1..23: mol_type = genomic DNA
tggcgtctctgaggaaatggagg

SEQ ID NO: 2357 - DNA, 23 bp, Homo sapiens
  source 1..23: mol_type = genomic DNA
tggctactacaaccagagcgagg

SEQ ID NO: 2358 - DNA, 23 bp, Homo sapiens
  source 1..23: mol_type = genomic DNA
tggctcccatctcagggtgaggg

SEQ ID NO: 2359 - DNA, 23 bp, Homo sapiens
  source 1..23: mol_type = genomic DNA
tggctcgcggctccatcctctgg

SEQ ID NO: 2360 - DNA, 23 bp, Homo sapiens
  source 1..23: mol_type = genomic DNA
tgggaaaaggggaaggtgagggg

SEQ ID NO: 2361 - DNA, 23 bp, Homo sapiens
  source 1..23: mol_type = genomic DNA
tgggaacctgggggcgaggaggg

SEQ ID NO: 2362 - DNA, 23 bp, Homo sapiens
  source 1..23: mol_type = genomic DNA
tgggaagacggctccgggaaagg

SEQ ID NO: 2363 - DNA, 23 bp, Homo sapiens
  source 1..23: mol_type = genomic DNA
tgggaagcaaatgtcctgtgagg

SEQ ID NO: 2364 - DNA, 23 bp, Homo sapiens
  source 1..23: mol_type = genomic DNA
tgggagactgggggcgaggaggg

SEQ ID NO: 2365 - DNA, 23 bp, Homo sapiens
  source 1..23: mol_type = genomic DNA
tgggagactgggggtgaggaggg

SEQ ID NO: 2366 - DNA, 23 bp, Homo sapiens
  source 1..23: mol_type = genomic DNA
tgggagcctgggagcgaggaggg

SEQ ID NO: 2367 - DNA, 23 bp, Homo sapiens
  source 1..23: mol_type = genomic DNA
tgggagcctggggcgagcagtgg

SEQ ID NO: 2368 - DNA, 23 bp, Homo sapiens
  source 1..23: mol_type = genomic DNA
tgggaggcggtccatgcggcggg

SEQ ID NO: 2369 - DNA, 23 bp, Homo sapiens
  source 1..23: mol_type = genomic DNA
tgggaggctgggggcgaggaggg

SEQ ID NO: 2370 - DNA, 23 bp, Homo sapiens
  source 1..23: mol_type = genomic DNA
tgggagggaagcggcctctatgg

SEQ ID NO: 2371 - DNA, 23 bp, Homo sapiens
  source 1..23: mol_type = genomic DNA
tgggataaggagggagatggggg

SEQ ID NO: 2372 - DNA, 23 bp, Homo sapiens
  source 1..23: mol_type = genomic DNA
tgggcggggctcgggggagctgg

SEQ ID NO: 2373 - DNA, 23 bp, Homo sapiens
  source 1..23: mol_type = genomic DNA
tgggcggggggggggtggggtgg

SEQ ID NO: 2374 - DNA, 23 bp, Homo sapiens
  source 1..23: mol_type = genomic DNA
tggggcggggttcgggggacggg

SEQ ID NO: 2375 - DNA, 23 bp, Homo sapiens
  source 1..23: mol_type = genomic DNA
tggggggggggggggcagagggg

SEQ ID NO: 2376 - DNA, 23 bp, Homo sapiens
  source 1..23: mol_type = genomic DNA
tggggtctagagtgggcaggggg

SEQ ID NO: 2377 - DNA, 23 bp, Homo sapiens
  source 1..23: mol_type = genomic DNA
tggggtggcgggtctgggggggg

SEQ ID NO: 2378 - DNA, 23 bp, Homo sapiens
  source 1..23: mol_type = genomic DNA
tgggtcacgtgtgtctttgcggg

SEQ ID NO: 2379 - DNA, 23 bp, Homo sapiens
  source 1..23: mol_type = genomic DNA
tgggttaaggagggagatggggg

SEQ ID NO: 2380 - DNA, 23 bp, Homo sapiens
  source 1..23: mol_type = genomic DNA
tgggttttgttgtcccactgggg

SEQ ID NO: 2381 - DNA, 23 bp, Homo sapiens
  source 1..23: mol_type = genomic DNA
tggtcaccgctaagatgtgtagg

SEQ ID NO: 2382 - DNA, 23 bp, Homo sapiens
  source 1..23: mol_type = genomic DNA
tggtcatacccgcggaggagggg

SEQ ID NO: 2383 - DNA, 23 bp, Homo sapiens
  source 1..23: mol_type = genomic DNA
tggtcatatgtgtcttggggggg

SEQ ID NO: 2384 - DNA, 23 bp, Homo sapiens
  source 1..23: mol_type = genomic DNA
tggtgggcacgtgcgtggagtgg

SEQ ID NO: 2385 - DNA, 23 bp, Homo sapiens
  source 1..23: mol_type = genomic DNA
tggtgggggtgggagtgtgaagg

SEQ ID NO: 2386 - DNA, 23 bp, Homo sapiens
  source 1..23: mol_type = genomic DNA
tggtggtcatatgtgtcttgggg

SEQ ID NO: 2387 - DNA, 23 bp, Homo sapiens
  source 1..23: mol_type = genomic DNA
tggttagtcatatgcgttttggg

SEQ ID NO: 2388 - DNA, 23 bp, Homo sapiens
  source 1..23: mol_type = genomic DNA
tggttgctactgtgatgtgtagg

SEQ ID NO: 2389 - DNA, 23 bp, Homo sapiens
  source 1..23: mol_type = genomic DNA
tggttggtcggggccgggcaggg

SEQ ID NO: 2390 - DNA, 23 bp, Homo sapiens
  source 1..23: mol_type = genomic DNA
tgtagaaatacctcaaggagtgg

SEQ ID NO: 2391 - DNA, 23 bp, Homo sapiens
  source 1..23: mol_type = genomic DNA
tgtagaaatacctcatgaagtgg

SEQ ID NO: 2392 - DNA, 23 bp, Homo sapiens
  source 1..23: mol_type = genomic DNA
tgtagaaatacctcatggagagg

SEQ ID NO: 2393 - DNA, 23 bp, Homo sapiens
  source 1..23: mol_type = genomic DNA
tgtagcccacggcgatgaagcgg

SEQ ID NO: 2394 - DNA, 23 bp, Homo sapiens
  source 1..23: mol_type = genomic DNA
tgtagccgcgcaggttccgcagg

SEQ ID NO: 2395 - DNA, 23 bp, Homo sapiens
  source 1..23: mol_type = genomic DNA
tgtaggacagctgcctgtgtggg

SEQ ID NO: 2396 - DNA, 23 bp, Homo sapiens
  source 1..23: mol_type = genomic DNA
tgtaggaggaagagctcaggtgg

SEQ ID NO: 2397 - DNA, 23 bp, Homo sapiens
  source 1..23: mol_type = genomic DNA
tgtcctgtgagatcccagaaagg

SEQ ID NO: 2398 - DNA, 23 bp, Homo sapiens
  source 1..23: mol_type = genomic DNA
tgtgagacccggcctcgctctgg

SEQ ID NO: 2399 - DNA, 23 bp, Homo sapiens
  source 1..23: mol_type = genomic DNA
tgtgcagcacgaggggctgctgg

SEQ ID NO: 2400 - DNA, 23 bp, Homo sapiens
  source 1..23: mol_type = genomic DNA
tgtgcagcacgaggggctgtcgg

SEQ ID NO: 2401 - DNA, 23 bp, Homo sapiens
  source 1..23: mol_type = genomic DNA
tgtggagaccaagcctgcagggg

SEQ ID NO: 2402 - DNA, 23 bp, Homo sapiens
  source 1..23: mol_type = genomic DNA
tgtgtctttgcggggtctgatgg

SEQ ID NO: 2403 - DNA, 23 bp, Homo sapiens
  source 1..23: mol_type = genomic DNA
tgtgtgactgcagacccaggcgg

SEQ ID NO: 2404 - DNA, 23 bp, Homo sapiens
  source 1..23: mol_type = genomic DNA
ttaacccatctcagggtgagggg

SEQ ID NO: 2405 - DNA, 23 bp, Homo sapiens
  source 1..23: mol_type = genomic DNA
ttaagtctgtgtgttggtcttgg

SEQ ID NO: 2406 - DNA, 23 bp, Homo sapiens
  source 1..23: mol_type = genomic DNA
ttaattgtcctagacagcagagg

SEQ ID NO: 2407 - DNA, 23 bp, Homo sapiens
  source 1..23: mol_type = genomic DNA
ttagaccaccaagcacaagtggg

SEQ ID NO: 2408 - DNA, 23 bp, Homo sapiens
  source 1..23: mol_type = genomic DNA
ttagaccgcggcggacatggcgg

SEQ ID NO: 2409 - DNA, 23 bp, Homo sapiens
  source 1..23: mol_type = genomic DNA
ttagatcacccagcgcaagtggg

SEQ ID NO: 2410 - DNA, 23 bp, Homo sapiens
  source 1..23: mol_type = genomic DNA
ttatcccaggtgcctgcgtccgg

SEQ ID NO: 2411 - DNA, 23 bp, Homo sapiens
  source 1..23: mol_type = genomic DNA
ttatcccatctcagggtgagggg

SEQ ID NO: 2412 - DNA, 23 bp, Homo sapiens
  source 1..23: mol_type = genomic DNA
ttcacatccgtgtcctggcccgg

SEQ ID NO: 2413 - DNA, 23 bp, Homo sapiens
  source 1..23: mol_type = genomic DNA
ttcacattcgtgtcccggcccgg

SEQ ID NO: 2414 - DNA, 23 bp, Homo sapiens
  source 1..23: mol_type = genomic DNA
ttcatatcactcacagtgagggg

SEQ ID NO: 2415 - DNA, 23 bp, Homo sapiens
  source 1..23: mol_type = genomic DNA
ttcatggagtgggaggctggggg

SEQ ID NO: 2416 - DNA, 23 bp, Homo sapiens
  source 1..23: mol_type = genomic DNA
ttccagcattcatgagtcggggg

SEQ ID NO: 2417 - DNA, 23 bp, Homo sapiens
  source 1..23: mol_type = genomic DNA
ttcccccgactcatgaatgctgg

SEQ ID NO: 2418 - DNA, 23 bp, Homo sapiens
  source 1..23: mol_type = genomic DNA
ttcctcgtgggaggccatcccgg

SEQ ID NO: 2419 - DNA, 23 bp, Homo sapiens
  source 1..23: mol_type = genomic DNA
ttcctggaccgccgcggacacgg

SEQ ID NO: 2420 - DNA, 23 bp, Homo sapiens
  source 1..23: mol_type = genomic DNA
ttcgaccactgcggcagctgtgg

SEQ ID NO: 2421 - DNA, 23 bp, Homo sapiens
  source 1..23: mol_type = genomic DNA
ttcggggcggatatcggacccgg

SEQ ID NO: 2422 - DNA, 23 bp, Homo sapiens
  source 1..23: mol_type = genomic DNA
ttcggtaaggagggggatgaggg

SEQ ID NO: 2423 - DNA, 23 bp, Homo sapiens
  source 1..23: mol_type = genomic DNA
ttcgtgtcccggcccggccgcgg

SEQ ID NO: 2424 - DNA, 23 bp, Homo sapiens
  source 1..23: mol_type = genomic DNA
ttctagaagtcccaggtcccggg

SEQ ID NO: 2425 - DNA, 23 bp, Homo sapiens
  source 1..23: mol_type = genomic DNA
ttctcactccaattgggtgtcgg

SEQ ID NO: 2426 - DNA, 23 bp, Homo sapiens
  source 1..23: mol_type = genomic DNA
ttctcactcccatcgggtgtcgg

SEQ ID NO: 2427 - DNA, 23 bp, Homo sapiens
  source 1..23: mol_type = genomic DNA
ttctcactcctattgggtgtcgg

SEQ ID NO: 2428 - DNA, 23 bp, Homo sapiens
  source 1..23: mol_type = genomic DNA
ttctcagctgctccgcctcacgg

SEQ ID NO: 2429 - DNA, 23 bp, Homo sapiens
  source 1..23: mol_type = genomic DNA
ttctccacccacggcgcccgcgg

SEQ ID NO: 2430 - DNA, 23 bp, Homo sapiens
  source 1..23: mol_type = genomic DNA
ttctccccagacgccgagaatgg

SEQ ID NO: 2431 - DNA, 23 bp, Homo sapiens
  source 1..23: mol_type = genomic DNA
ttctccgctgctccgcctcacgg

SEQ ID NO: 2432 - DNA, 23 bp, Homo sapiens
  source 1..23: mol_type = genomic DNA
ttctctcggtcagtctgtgatgg

SEQ ID NO: 2433 - DNA, 23 bp, Homo sapiens
  source 1..23: mol_type = genomic DNA
ttctggaaggttccatcccctgg

SEQ ID NO: 2434 - DNA, 23 bp, Homo sapiens
  source 1..23: mol_type = genomic DNA
ttctggtagggaaggggtgaggg

SEQ ID NO: 2435 - DNA, 23 bp, Homo sapiens
  source 1..23: mol_type = genomic DNA
ttctgtttttgttctacctcagg

SEQ ID NO: 2436 - DNA, 23 bp, Homo sapiens
  source 1..23: mol_type = genomic DNA
ttcttctccctcaagaccagagg

SEQ ID NO: 2437 - DNA, 23 bp, Homo sapiens
  source 1..23: mol_type = genomic DNA
ttcttgtgggaggccagccccgg

SEQ ID NO: 2438 - DNA, 23 bp, Homo sapiens
  source 1..23: mol_type = genomic DNA
ttctttttgggtccaagactagg

SEQ ID NO: 2439 - DNA, 23 bp, Homo sapiens
  source 1..23: mol_type = genomic DNA
ttgagggagaagaatcctcctgg

SEQ ID NO: 2440 - DNA, 23 bp, Homo sapiens
  source 1..23: mol_type = genomic DNA
ttgagtgtgaagcagagaacagg

SEQ ID NO: 2441 - DNA, 23 bp, Homo sapiens
  source 1..23: mol_type = genomic DNA
ttgcctttcagtcccacacaagg

SEQ ID NO: 2442 - DNA, 23 bp, Homo sapiens
  source 1..23: mol_type = genomic DNA
ttgctactgtgatgtgtaggagg

SEQ ID NO: 2443 - DNA, 23 bp, Homo sapiens
  source 1..23: mol_type = genomic DNA
ttgctctatccatggcgcccggg

SEQ ID NO: 2444 - DNA, 23 bp, Homo sapiens
  source 1..23: mol_type = genomic DNA
ttgcttcccacaggtggaaaagg

SEQ ID NO: 2445 - DNA, 23 bp, Homo sapiens
  source 1..23: mol_type = genomic DNA
ttggggtctagagtgggcagggg

SEQ ID NO: 2446 - DNA, 23 bp, Homo sapiens
  source 1..23: mol_type = genomic DNA
ttggtcttgaagatctgttccgg

SEQ ID NO: 2447 - DNA, 23 bp, Homo sapiens
  source 1..23: mol_type = genomic DNA
ttggtgagtcatatgcgttttgg

SEQ ID NO: 2448 - DNA, 23 bp, Homo sapiens
  source 1..23: mol_type = genomic DNA
ttgtctccctttcttgtgggagg

SEQ ID NO: 2449 - DNA, 23 bp, Homo sapiens
  source 1..23: mol_type = genomic DNA
ttgtggagaccaagcctgcaggg

SEQ ID NO: 2450 - DNA, 23 bp, Homo sapiens
  source 1..23: mol_type = genomic DNA
ttgtgtcgggtccttcttccggg

SEQ ID NO: 2451 - DNA, 23 bp, Homo sapiens
  source 1..23: mol_type = genomic DNA
tttacatccgtgtcccggcccgg

SEQ ID NO: 2452 - DNA, 23 bp, Homo sapiens
  source 1..23: mol_type = genomic DNA
tttcaactgctccgccacatggg

SEQ ID NO: 2453 - DNA, 23 bp, Homo sapiens
  source 1..23: mol_type = genomic DNA
tttccagagagtgactctgaggg

SEQ ID NO: 2454 - DNA, 23 bp, Homo sapiens
  source 1..23: mol_type = genomic DNA
tttcctcccttcctcgtgggagg

SEQ ID NO: 2455 - DNA, 23 bp, Homo sapiens
  source 1..23: mol_type = genomic DNA
tttgaccacttcgaccactgcgg

SEQ ID NO: 2456 - DNA, 23 bp, Homo sapiens
  source 1..23: mol_type = genomic DNA
tttgtgacttcaagggcctctgg

SEQ ID NO: 2457 - DNA, 23 bp, Homo sapiens
  source 1..23: mol_type = genomic DNA
ttttcaagtcacaaagggaaggg

SEQ ID NO: 2458 - DNA, 23 bp, Homo sapiens
  source 1..23: mol_type = genomic DNA
tttttcaagtcacaaagggaagg

SEQ ID NO: 2459 - DNA, 23 bp, Homo sapiens
  source 1..23: mol_type = genomic DNA
tttttgggtccaagactaggagg

SEQ ID NO: 2460 - DNA, 23 bp, Homo sapiens
  source 1..23: mol_type = genomic DNA
aaaaatccccccaggttggtcgg

SEQ ID NO: 2461 - DNA, 23 bp, Homo sapiens
  source 1..23: mol_type = genomic DNA
aaaaatccccccgggtgggtcgg

SEQ ID NO: 2462 - DNA, 23 bp, Homo sapiens
  source 1..23: mol_type = genomic DNA
aaaaatccccccgggttggtcgg

SEQ ID NO: 2463 - DNA, 23 bp, Homo sapiens
  source 1..23: mol_type = genomic DNA
aaaaatctctgaaggaatgacgg

SEQ ID NO: 2464 - DNA, 23 bp, Homo sapiens
  source 1..23: mol_type = genomic DNA
aaaaattcccccgggttggtcgg

SEQ ID NO: 2465 - DNA, 23 bp, Homo sapiens
  source 1..23: mol_type = genomic DNA
aaaaggagggagctactctcagg

SEQ ID NO: 2466 - DNA, 23 bp, Homo sapiens
  source 1..23: mol_type = genomic DNA
aaaaggagggagctgctctcagg

SEQ ID NO: 2467 - DNA, 23 bp, Homo sapiens
  source 1..23: mol_type = genomic DNA
aaaaggagggagttacactcagg

SEQ ID NO: 2468 - DNA, 23 bp, Homo sapiens
  source 1..23: mol_type = genomic DNA
aaaatccccccaggttggtcggg

SEQ ID NO: 2469 - DNA, 23 bp, Homo sapiens
  source 1..23: mol_type = genomic DNA
aaaatccccccgggtgggtcggg

SEQ ID NO: 2470 - DNA, 23 bp, Homo sapiens
  source 1..23: mol_type = genomic DNA
aaaatccccccgggttggtcggg

SEQ ID NO: 2471 - DNA, 23 bp, Homo sapiens
  source 1..23: mol_type = genomic DNA
aaaatccccgcgggttgggcggg

SEQ ID NO: 2472 - DNA, 23 bp, Homo sapiens
  source 1..23: mol_type = genomic DNA
aaaatccccgcgggttggtcagg

SEQ ID NO: 2473 - DNA, 23 bp, Homo sapiens
  source 1..23: mol_type = genomic DNA
aaaatccccgcgggttggtcggg

SEQ ID NO: 2474 - DNA, 23 bp, Homo sapiens
  source 1..23: mol_type = genomic DNA
aaaatctctgaaggaatgacggg

SEQ ID NO: 2475 - DNA, 23 bp, Homo sapiens
  source 1..23: mol_type = genomic DNA
aaaatctctgaaggagtgacggg

SEQ ID NO: 2476 - DNA, 23 bp, Homo sapiens
  source 1..23: mol_type = genomic DNA
aaaatgccctatgaggggactgg

SEQ ID NO: 2477 - DNA, 23 bp, Homo sapiens
  source 1..23: mol_type = genomic DNA
aaaatgccctgtgaggggacagg

SEQ ID NO: 2478 - DNA, 23 bp, Homo sapiens
  source 1..23: mol_type = genomic DNA
aaaatgccctgtgaggggactgg

SEQ ID NO: 2479 - DNA, 23 bp, Homo sapiens
  source 1..23: mol_type = genomic DNA
aaaatgtcctgtgagggcactgg

SEQ ID NO: 2480 - DNA, 23 bp, Homo sapiens
  source 1..23: mol_type = genomic DNA
aaaatgtcctgtgaggggactgg

SEQ ID NO: 2481 - DNA, 23 bp, Homo sapiens
  source 1..23: mol_type = genomic DNA
aaaattcccccgggttggtcggg

SEQ ID NO: 2482 - DNA, 23 bp, Homo sapiens
  source 1..23: mol_type = genomic DNA
aaaattctagtccctgaagaggg

SEQ ID NO: 2483 - DNA, 23 bp, Homo sapiens
  source 1..23: mol_type = genomic DNA
aaacacagggaaagcagctgtgg

SEQ ID NO: 2484 - DNA, 23 bp, Homo sapiens
  source 1..23: mol_type = genomic DNA
aaacacgaggaaagcaagtgtgg

SEQ ID NO: 2485 - DNA, 23 bp, Homo sapiens
  source 1..23: mol_type = genomic DNA
aaacacggggaaagcagctgtgg

SEQ ID NO: 2486 - DNA, 23 bp, Homo sapiens
  source 1..23: mol_type = genomic DNA
aaacatgaagaaagcagatgtgg

SEQ ID NO: 2487 - DNA, 23 bp, Homo sapiens
  source 1..23: mol_type = genomic DNA
aaacatgaagaaagcaggtgtgg

SEQ ID NO: 2488 - DNA, 23 bp, Homo sapiens
  source 1..23: mol_type = genomic DNA
aaacatggggaaagcagctgtgg

SEQ ID NO: 2489 - DNA, 23 bp, Homo sapiens
  source 1..23: mol_type = genomic DNA
aaacatggggaaagcagttgtgg

SEQ ID NO: 2490 - DNA, 23 bp, Homo sapiens
  source 1..23: mol_type = genomic DNA
aaaccgggtaaacgcgcctgggg

SEQ ID NO: 2491 - DNA, 23 bp, Homo sapiens
  source 1..23: mol_type = genomic DNA
aaaccgggtaaaggcgactaggg

SEQ ID NO: 2492 - DNA, 23 bp, Homo sapiens
  source 1..23: mol_type = genomic DNA
aaaccgggtaaaggcgactgggg

SEQ ID NO: 2493 - DNA, 23 bp, Homo sapiens
  source 1..23: mol_type = genomic DNA
aaaccgggtaaaggtgactgggg

SEQ ID NO: 2494 - DNA, 23 bp, Homo sapiens
  source 1..23: mol_type = genomic DNA
aaactcaggggagtgggagtggg

SEQ ID NO: 2495 - DNA, 23 bp, Homo sapiens
  source 1..23: mol_type = genomic DNA
aaagaataggagattatcccagg

SEQ ID NO: 2496 - DNA, 23 bp, Homo sapiens
  source 1..23: mol_type = genomic DNA
aaagcaggagcccttcagcaggg

SEQ ID NO: 2497 - DNA, 23 bp, Homo sapiens
  source 1..23: mol_type = genomic DNA
aaagcccctcaccctgagatggg

SEQ ID NO: 2498 - DNA, 23 bp, Homo sapiens
  source 1..23: mol_type = genomic DNA
aaagcccgcacgcacccaccggg

SEQ ID NO: 2499 - DNA, 23 bp, Homo sapiens
  source 1..23: mol_type = genomic DNA
aaaggcgcctgggcctctcccgg

SEQ ID NO: 2500 - DNA, 23 bp, Homo sapiens
  source 1..23: mol_type = genomic DNA
aaagtccccacgcacccacccgg

SEQ ID NO: 2501 - DNA, 23 bp, Homo sapiens
  source 1..23: mol_type = genomic DNA
aaagtccccagtcacccacccgg

SEQ ID NO: 2502 - DNA, 23 bp, Homo sapiens
  source 1..23: mol_type = genomic DNA
aaagtccgcacgcacccaccggg

SEQ ID NO: 2503 - DNA, 23 bp, Homo sapiens
  source 1..23: mol_type = genomic DNA
aaagttcgagtctctgagcgggg

SEQ ID NO: 2504 - DNA, 23 bp, Homo sapiens
  source 1..23: mol_type = genomic DNA
aaagttcgagtctctgagtgggg

SEQ ID NO: 2505 - DNA, 23 bp, Homo sapiens
  source 1..23: mol_type = genomic DNA
aaagttctagtctctgagggagg

SEQ ID NO: 2506 - DNA, 23 bp, Homo sapiens
  source 1..23: mol_type = genomic DNA
aaatccccccaggttggtcgggg

SEQ ID NO: 2507 - DNA, 23 bp, Homo sapiens
  source 1..23: mol_type = genomic DNA
aaatccccccgggtgggtcgggg

SEQ ID NO: 2508 - DNA, 23 bp, Homo sapiens
  source 1..23: mol_type = genomic DNA
aaatccccccgggttggtcgggg

SEQ ID NO: 2509 - DNA, 23 bp, Homo sapiens
  source 1..23: mol_type = genomic DNA
aaatccccgcgggttgggcgggg

SEQ ID NO: 2510 - DNA, 23 bp, Homo sapiens
  source 1..23: mol_type = genomic DNA
aaatccccgcgggttggtcaggg

SEQ ID NO: 2511 - DNA, 23 bp, Homo sapiens
  source 1..23: mol_type = genomic DNA
aaatccccgcgggttggtcgggg

SEQ ID NO: 2512 - DNA, 23 bp, Homo sapiens
  source 1..23: mol_type = genomic DNA
aaatgccctatgaggggactggg

SEQ ID NO: 2513 - DNA, 23 bp, Homo sapiens
  source 1..23: mol_type = genomic DNA
aaatgccctgtgaggggacaggg

SEQ ID NO: 2514 - DNA, 23 bp, Homo sapiens
  source 1..23: mol_type = genomic DNA
aaatgccctgtgaggggactggg

SEQ ID NO: 2515 - DNA, 23 bp, Homo sapiens
  source 1..23: mol_type = genomic DNA
aaatgtcctgtgagggcactggg

SEQ ID NO: 2516 - DNA, 23 bp, Homo sapiens
  source 1..23: mol_type = genomic DNA
aaatgtcctgtgaggggactggg

SEQ ID NO: 2517 - DNA, 23 bp, Homo sapiens
  source 1..23: mol_type = genomic DNA
aaatgtgtgaatgcagacccagg

SEQ ID NO: 2518 - DNA, 23 bp, Homo sapiens
  source 1..23: mol_type = genomic DNA
aaatgtgtgactgcagacccagg

SEQ ID NO: 2519 - DNA, 23 bp, Homo sapiens
  source 1..23: mol_type = genomic DNA
aaattcccccgggttggtcgggg

SEQ ID NO: 2520 - DNA, 23 bp, Homo sapiens
  source 1..23: mol_type = genomic DNA
aacaatgcccacgatggggacgg

SEQ ID NO: 2521 - DNA, 23 bp, Homo sapiens
  source 1..23: mol_type = genomic DNA
aacaatgcccacgatggggatgg

SEQ ID NO: 2522 - DNA, 23 bp, Homo sapiens
  source 1..23: mol_type = genomic DNA
aacacagggaaagcagctgtggg

SEQ ID NO: 2523 - DNA, 23 bp, Homo sapiens
  source 1..23: mol_type = genomic DNA
aacacgaggaaagcaagtgtggg

SEQ ID NO: 2524 - DNA, 23 bp, Homo sapiens
  source 1..23: mol_type = genomic DNA
aacacggggaaagcagctgtggg

SEQ ID NO: 2525 - DNA, 23 bp, Homo sapiens
  source 1..23: mol_type = genomic DNA
aacaggaaagatgattggagagg

SEQ ID NO: 2526 - DNA, 23 bp, Homo sapiens
  source 1..23: mol_type = genomic DNA
aacaggaaagatgattggggagg

SEQ ID NO: 2527 - DNA, 23 bp, Homo sapiens
  source 1..23: mol_type = genomic DNA
aacatgaagaaagcagatgtggg

SEQ ID NO: 2528 - DNA, 23 bp, Homo sapiens
  source 1..23: mol_type = genomic DNA
aacatgaagaaagcaggtgtggg

SEQ ID NO: 2529 - DNA, 23 bp, Homo sapiens
  source 1..23: mol_type = genomic DNA
aacatggggaaagcagctgtggg

SEQ ID NO: 2530 - DNA, 23 bp, Homo sapiens
  source 1..23: mol_type = genomic DNA
aacatggggaaagcagttgtggg

SEQ ID NO: 2531 - DNA, 23 bp, Homo sapiens
  source 1..23: mol_type = genomic DNA
aaccactcatcagtattcgaggg

SEQ ID NO: 2532 - DNA, 23 bp, Homo sapiens
  source 1..23: mol_type = genomic DNA
aaccagtcatcagtattcgaggg

SEQ ID NO: 2533 - DNA, 23 bp, Homo sapiens
  source 1..23: mol_type = genomic DNA
aacccagggcccagcacctcagg

SEQ ID NO: 2534 - DNA, 23 bp, Homo sapiens
  source 1..23: mol_type = genomic DNA
aaccccgcactcacaggcccagg

SEQ ID NO: 2535 - DNA, 23 bp, Homo sapiens
  source 1..23: mol_type = genomic DNA
aaccccgcactcaccggcccagg

SEQ ID NO: 2536 - DNA, 23 bp, Homo sapiens
  source 1..23: mol_type = genomic DNA
aaccccgcactcaccggtccagg

SEQ ID NO: 2537 - DNA, 23 bp, Homo sapiens
  source 1..23: mol_type = genomic DNA
aacccgacacccaatgggagtgg

SEQ ID NO: 2538 - DNA, 23 bp, Homo sapiens
  source 1..23: mol_type = genomic DNA
aacccgcccagaccctcgaccgg

SEQ ID NO: 2539 - DNA, 23 bp, Homo sapiens
  source 1..23: mol_type = genomic DNA
aacccgcccagaccctcggccgg

SEQ ID NO: 2540 - DNA, 23 bp, Homo sapiens
  source 1..23: mol_type = genomic DNA
aacccgcccgaccctcctcccgg

SEQ ID NO: 2541 - DNA, 23 bp, Homo sapiens
  source 1..23: mol_type = genomic DNA
aaccctcatcctgctgctctcgg

SEQ ID NO: 2542 - DNA, 23 bp, Homo sapiens
  source 1..23: mol_type = genomic DNA
aaccctcctcctgctactctcgg

SEQ ID NO: 2543 - DNA, 23 bp, Homo sapiens
  source 1..23: mol_type = genomic DNA
aaccctcctcctgctactcttgg

SEQ ID NO: 2544 - DNA, 23 bp, Homo sapiens
  source 1..23: mol_type = genomic DNA
aaccctcctcctgctgctctcgg

SEQ ID NO: 2545 - DNA, 23 bp, Homo sapiens
  source 1..23: mol_type = genomic DNA
aaccctcctcctgctgctctggg

SEQ ID NO: 2546 - DNA, 23 bp, Homo sapiens
  source 1..23: mol_type = genomic DNA
aaccctcgtcctgctactctcgg

SEQ ID NO: 2547 - DNA, 23 bp, Homo sapiens
  source 1..23: mol_type = genomic DNA
aaccgtcctcctgctgctctcgg

SEQ ID NO: 2548 - DNA, 23 bp, Homo sapiens
  source 1..23: mol_type = genomic DNA
aaccgtcctcctgctgctctggg

SEQ ID NO: 2549 - DNA, 23 bp, Homo sapiens
  source 1..23: mol_type = genomic DNA
aacctcgcactcacaggcccagg

SEQ ID NO: 2550 - DNA, 23 bp, Homo sapiens
  source 1..23: mol_type = genomic DNA
aacgagaagaagaggaaaatggg

SEQ ID NO: 2551 - DNA, 23 bp, Homo sapiens
  source 1..23: mol_type = genomic DNA
aacgaggtgcccgcccggcgagg

SEQ ID NO: 2552 - DNA, 23 bp, Homo sapiens
  source 1..23: mol_type = genomic DNA
aacgatgcccaagttggggatgg

SEQ ID NO: 2553 - DNA, 23 bp, Homo sapiens
  source 1..23: mol_type = genomic DNA
aacgatgcccacgatggggatgg

SEQ ID NO: 2554 - DNA, 23 bp, Homo sapiens
  source 1..23: mol_type = genomic DNA
aacgatgcccatgatggggatgg

SEQ ID NO: 2555 - DNA, 23 bp, Homo sapiens
  source 1..23: mol_type = genomic DNA
aacgcgcctggggctctcgccgg

SEQ ID NO: 2556 - DNA, 23 bp, Homo sapiens
  source 1..23: mol_type = genomic DNA
aacggacaggacacctggggtgg

SEQ ID NO: 2557 - DNA, 23 bp, Homo sapiens
  source 1..23: mol_type = genomic DNA
aactcaggacaccgagcttgtgg

SEQ ID NO: 2558 - DNA, 23 bp, Homo sapiens
  source 1..23: mol_type = genomic DNA
aactcaggacactgagcttgtgg

SEQ ID NO: 2559 - DNA, 23 bp, Homo sapiens
  source 1..23: mol_type = genomic DNA
aactcaggggagtgggagtgggg

SEQ ID NO: 2560 - DNA, 23 bp, Homo sapiens
  source 1..23: mol_type = genomic DNA
aagaaaagtcatggttcccaagg

SEQ ID NO: 2561 - DNA, 23 bp, Homo sapiens
  source 1..23: mol_type = genomic DNA
aagaaagcagatgtgggccctgg

SEQ ID NO: 2562 - DNA, 23 bp, Homo sapiens
  source 1..23: mol_type = genomic DNA
aagaaagcaggtgtgggtcctgg

SEQ ID NO: 2563 - DNA, 23 bp, Homo sapiens
  source 1..23: mol_type = genomic DNA
aagaagacgctgcagcgcgcggg

SEQ ID NO: 2564 - DNA, 23 bp, Homo sapiens
  source 1..23: mol_type = genomic DNA
aagaagagctcaggtggagaagg

SEQ ID NO: 2565 - DNA, 23 bp, Homo sapiens
  source 1..23: mol_type = genomic DNA
aagaaggacccgacacaagttgg

SEQ ID NO: 2566 - DNA, 23 bp, Homo sapiens
  source 1..23: mol_type = genomic DNA
aagaaggacccgacacaggttgg

SEQ ID NO: 2567 - DNA, 23 bp, Homo sapiens
  source 1..23: mol_type = genomic DNA
aagaaggacccgacataggttgg

SEQ ID NO: 2568 - DNA, 23 bp, Homo sapiens
  source 1..23: mol_type = genomic DNA
aagaaggacccgacgcaggttgg

SEQ ID NO: 2569 - DNA, 23 bp, Homo sapiens
  source 1..23: mol_type = genomic DNA
aagaaggacccgtcgcaggttgg

SEQ ID NO: 2570 - DNA, 23 bp, Homo sapiens
  source 1..23: mol_type = genomic DNA
aagaaggaccctacataggttgg

SEQ ID NO: 2571 - DNA, 23 bp, Homo sapiens
  source 1..23: mol_type = genomic DNA
aagacactgattggcttctctgg

SEQ ID NO: 2572 - DNA, 23 bp, Homo sapiens
  source 1..23: mol_type = genomic DNA
aagacagctctgggaaaagaggg

SEQ ID NO: 2573 - DNA, 23 bp, Homo sapiens
  source 1..23: mol_type = genomic DNA
aagacccgggaagccgcgccggg

SEQ ID NO: 2574 - DNA, 23 bp, Homo sapiens
  source 1..23: mol_type = genomic DNA
aagacctggtcagagcccacagg

SEQ ID NO: 2575 - DNA, 23 bp, Homo sapiens
  source 1..23: mol_type = genomic DNA
aagacctggtcagagcccgcagg

SEQ ID NO: 2576 - DNA, 23 bp, Homo sapiens
  source 1..23: mol_type = genomic DNA
aagacggctctgggaaaagaggg

SEQ ID NO: 2577 - DNA, 23 bp, Homo sapiens
  source 1..23: mol_type = genomic DNA
aagacggctctgggaaaggaagg

SEQ ID NO: 2578 - DNA, 23 bp, Homo sapiens
  source 1..23: mol_type = genomic DNA
aagacggctctgggaaaggaggg

SEQ ID NO: 2579 - DNA, 23 bp, Homo sapiens
  source 1..23: mol_type = genomic DNA
aagagcccctcaccctgagctgg

SEQ ID NO: 2580 - DNA, 23 bp, Homo sapiens
  source 1..23: mol_type = genomic DNA
aagagcgcaggtcctcgttcagg

SEQ ID NO: 2581 - DNA, 23 bp, Homo sapiens
  source 1..23: mol_type = genomic DNA
aagagcgcaggtcctctttcagg

SEQ ID NO: 2582 - DNA, 23 bp, Homo sapiens
  source 1..23: mol_type = genomic DNA
aagagctcaggtggggtgaaggg

SEQ ID NO: 2583 - DNA, 23 bp, Homo sapiens
  source 1..23: mol_type = genomic DNA
aagagggtcatggtggacatcgg

SEQ ID NO: 2584 - DNA, 23 bp, Homo sapiens
  source 1..23: mol_type = genomic DNA
aagagggtcatggtggacatggg

SEQ ID NO: 2585 - DNA, 23 bp, Homo sapiens
  source 1..23: mol_type = genomic DNA
aagagtaagtgctggcacacagg

SEQ ID NO: 2586 - DNA, 23 bp, Homo sapiens
  source 1..23: mol_type = genomic DNA
aagagtaagttctggcacacagg

SEQ ID NO: 2587 - DNA, 23 bp, Homo sapiens
  source 1..23: mol_type = genomic DNA
aagatggccctgggaaaggaggg

SEQ ID NO: 2588 - DNA, 23 bp, Homo sapiens
  source 1..23: mol_type = genomic DNA
aagatggctctgggaaaagaggg

SEQ ID NO: 2589 - DNA, 23 bp, Homo sapiens
  source 1..23: mol_type = genomic DNA
aagatggctctgggaaaggaggg

SEQ ID NO: 2590 - DNA, 23 bp, Homo sapiens
  source 1..23: mol_type = genomic DNA
aagcaacgggcccgcctggcggg

SEQ ID NO: 2591 - DNA, 23 bp, Homo sapiens
  source 1..23: mol_type = genomic DNA
aagcaaggggcccgcccggcggg

SEQ ID NO: 2592 - DNA, 23 bp, Homo sapiens
  source 1..23: mol_type = genomic DNA
aagcaaggggcccgcctggcggg

SEQ ID NO: 2593 - DNA, 23 bp, Homo sapiens
  source 1..23: mol_type = genomic DNA
aagcaaggggccctcctggcggg

SEQ ID NO: 2594 - DNA, 23 bp, Homo sapiens
  source 1..23: mol_type = genomic DNA
aagccccgcttcatcgccgtggg

SEQ ID NO: 2595 - DNA, 23 bp, Homo sapiens
  source 1..23: mol_type = genomic DNA
aagcccctcaccctgagatgggg

SEQ ID NO: 2596 - DNA, 23 bp, Homo sapiens
  source 1..23: mol_type = genomic DNA
aagcggggctccccgcggccagg

SEQ ID NO: 2597 - DNA, 23 bp, Homo sapiens
  source 1..23: mol_type = genomic DNA
aagcggggctccccgcggccggg

SEQ ID NO: 2598 - DNA, 23 bp, Homo sapiens
  source 1..23: mol_type = genomic DNA
aagcggggctctccactgccggg

SEQ ID NO: 2599 - DNA, 23 bp, Homo sapiens
  source 1..23: mol_type = genomic DNA
aagcggggctctccgcggccagg

SEQ ID NO: 2600 - DNA, 23 bp, Homo sapiens
  source 1..23: mol_type = genomic DNA
aagcggggctctccgcggccggg

SEQ ID NO: 2601 - DNA, 23 bp, Homo sapiens
  source 1..23: mol_type = genomic DNA
aagcggggcttcccgcggccggg

SEQ ID NO: 2602 - DNA, 23 bp, Homo sapiens
  source 1..23: mol_type = genomic DNA
aagcgtcctgccggtacccgcgg

SEQ ID NO: 2603 - DNA, 23 bp, Homo sapiens
  source 1..23: mol_type = genomic DNA
aagcgtcctgctggtacccgcgg

SEQ ID NO: 2604 - DNA, 23 bp, Homo sapiens
  source 1..23: mol_type = genomic DNA
aaggacaagctggagcgcgctgg

SEQ ID NO: 2605 - DNA, 23 bp, Homo sapiens
  source 1..23: mol_type = genomic DNA
aaggacacgctggagcgcgcggg

SEQ ID NO: 2606 - DNA, 23 bp, Homo sapiens
  source 1..23: mol_type = genomic DNA
aaggagacgctgcagcgcacggg

SEQ ID NO: 2607 - DNA, 23 bp, Homo sapiens
  source 1..23: mol_type = genomic DNA
aaggagacgctgcagcgcgcagg

SEQ ID NO: 2608 - DNA, 23 bp, Homo sapiens
  source 1..23: mol_type = genomic DNA
aaggagacgctgcagcgcgcggg

SEQ ID NO: 2609 - DNA, 23 bp, Homo sapiens
  source 1..23: mol_type = genomic DNA
aaggatgcccacgatggggatgg

SEQ ID NO: 2610 - DNA, 23 bp, Homo sapiens
  source 1..23: mol_type = genomic DNA
aaggcctgagaggaaagtcacgg

SEQ ID NO: 2611 - DNA, 23 bp, Homo sapiens
  source 1..23: mol_type = genomic DNA
aaggcgactagggctctctccgg

SEQ ID NO: 2612 - DNA, 23 bp, Homo sapiens
  source 1..23: mol_type = genomic DNA
aaggcgactggggctctctccgg

SEQ ID NO: 2613 - DNA, 23 bp, Homo sapiens
  source 1..23: mol_type = genomic DNA
aaggcgcctgggcctctcccggg

SEQ ID NO: 2614 - DNA, 23 bp, Homo sapiens
  source 1..23: mol_type = genomic DNA
aaggctgctgcaggggtcaaagg

SEQ ID NO: 2615 - DNA, 23 bp, Homo sapiens
  source 1..23: mol_type = genomic DNA
aaggctgctgccggtgtcaaagg

SEQ ID NO: 2616 - DNA, 23 bp, Homo sapiens
  source 1..23: mol_type = genomic DNA
aaggggtgaagagcggggtctgg

SEQ ID NO: 2617 - DNA, 23 bp, Homo sapiens
  source 1..23: mol_type = genomic DNA
aaggggtgaggagtggggtctgg

SEQ ID NO: 2618 - DNA, 23 bp, Homo sapiens
  source 1..23: mol_type = genomic DNA
aaggggtgaggggtggggtctgg

SEQ ID NO: 2619 - DNA, 23 bp, Homo sapiens
  source 1..23: mol_type = genomic DNA
aaggtgactggggctctctccgg

SEQ ID NO: 2620 - DNA, 23 bp, Homo sapiens
  source 1..23: mol_type = genomic DNA
aagtaccagggccccaggcgtgg

SEQ ID NO: 2621 - DNA, 23 bp, Homo sapiens
  source 1..23: mol_type = genomic DNA
aagtcccagggccccaggcgtgg

SEQ ID NO: 2622 - DNA, 23 bp, Homo sapiens
  source 1..23: mol_type = genomic DNA
aagtccctgaggaaatggagggg

SEQ ID NO: 2623 - DNA, 23 bp, Homo sapiens
  source 1..23: mol_type = genomic DNA
aagtcctggagcccttcagccgg

SEQ ID NO: 2624 - DNA, 23 bp, Homo sapiens
  source 1..23: mol_type = genomic DNA
aagtcctggagcccttcagctgg

SEQ ID NO: 2625 - DNA, 23 bp, Homo sapiens
  source 1..23: mol_type = genomic DNA
aagtccttgaggaaatggagggg

SEQ ID NO: 2626 - DNA, 23 bp, Homo sapiens
  source 1..23: mol_type = genomic DNA
aagtcgctgttccctcctcaggg

SEQ ID NO: 2627 - DNA, 23 bp, Homo sapiens
  source 1..23: mol_type = genomic DNA
aagtcgctgttccctcttcaggg

SEQ ID NO: 2628 - DNA, 23 bp, Homo sapiens
  source 1..23: mol_type = genomic DNA
aagtcgctgttcccttctcaggg

SEQ ID NO: 2629 - DNA, 23 bp, Homo sapiens
  source 1..23: mol_type = genomic DNA
aagtctctgaggaaatggagggg

SEQ ID NO: 2630 - DNA, 23 bp, Homo sapiens
  source 1..23: mol_type = genomic DNA
aagtgaaactcaggggagtgggg

SEQ ID NO: 2631 - DNA, 23 bp, Homo sapiens
  source 1..23: mol_type = genomic DNA
aagtgaaactcgtgggagtgggg

SEQ ID NO: 2632 - DNA, 23 bp, Homo sapiens
  source 1..23: mol_type = genomic DNA
aagtgatggcagtgggcgtgtgg

SEQ ID NO: 2633 - DNA, 23 bp, Homo sapiens
  source 1..23: mol_type = genomic DNA
aagtgatggcggcaggcgtgtgg

SEQ ID NO: 2634 - DNA, 23 bp, Homo sapiens
  source 1..23: mol_type = genomic DNA
aagtgatggcggcgggcgtgtgg

SEQ ID NO: 2635 - DNA, 23 bp, Homo sapiens
  source 1..23: mol_type = genomic DNA
aagtgatggcggtgggcgtgtgg

SEQ ID NO: 2636 - DNA, 23 bp, Homo sapiens
  source 1..23: mol_type = genomic DNA
aagtgatgggggcgggagtgtgg

SEQ ID NO: 2637 - DNA, 23 bp, Homo sapiens
  source 1..23: mol_type = genomic DNA
aagtgatgggggtgggagtgtgg

SEQ ID NO: 2638 - DNA, 23 bp, Homo sapiens
  source 1..23: mol_type = genomic DNA
aagtggggctccccgcggccggg

SEQ ID NO: 2639 - DNA, 23 bp, Homo sapiens
  source 1..23: mol_type = genomic DNA
aagtggggctctccgcggccggg

SEQ ID NO: 2640 - DNA, 23 bp, Homo sapiens
  source 1..23: mol_type = genomic DNA
aagtggggctctccgcggctggg

SEQ ID NO: 2641 - DNA, 23 bp, Homo sapiens
  source 1..23: mol_type = genomic DNA
aagtggtgggggtgggagtgtgg

SEQ ID NO: 2642 - DNA, 23 bp, Homo sapiens
  source 1..23: mol_type = genomic DNA
aatatgtatggctgcgacgtggg

SEQ ID NO: 2643 - DNA, 23 bp, Homo sapiens
  source 1..23: mol_type = genomic DNA
aatcactgggatattgtgtttgg

SEQ ID NO: 2644 - DNA, 23 bp, Homo sapiens
  source 1..23: mol_type = genomic DNA
aatcagcgtctacgcagtcccgg

SEQ ID NO: 2645 - DNA, 23 bp, Homo sapiens
  source 1..23: mol_type = genomic DNA
aatcagcgtctccgcagtcccgg

SEQ ID NO: 2646 - DNA, 23 bp, Homo sapiens
  source 1..23: mol_type = genomic DNA
aatcagtgtcgtcgcggtcgcgg

SEQ ID NO: 2647 - DNA, 23 bp, Homo sapiens
  source 1..23: mol_type = genomic DNA
aatcatgggcccacccagcctgg

SEQ ID NO: 2648 - DNA, 23 bp, Homo sapiens
  source 1..23: mol_type = genomic DNA
aatcatgggccgacccagcctgg

SEQ ID NO: 2649 - DNA, 23 bp, Homo sapiens
  source 1..23: mol_type = genomic DNA
aatcatgggcctacccagcctgg

SEQ ID NO: 2650 - DNA, 23 bp, Homo sapiens
  source 1..23: mol_type = genomic DNA
aatcatgggcctacccagtctgg

SEQ ID NO: 2651 - DNA, 23 bp, Homo sapiens
  source 1..23: mol_type = genomic DNA
aatccgacacccaatgggagtgg

SEQ ID NO: 2652 - DNA, 23 bp, Homo sapiens
  source 1..23: mol_type = genomic DNA
aatccgcccagaccctcgaccgg

SEQ ID NO: 2653 - DNA, 23 bp, Homo sapiens
  source 1..23: mol_type = genomic DNA
aatctgtccttcattgtcacagg

SEQ ID NO: 2654 - DNA, 23 bp, Homo sapiens
  source 1..23: mol_type = genomic DNA
aatctgtccttcattttaacagg

SEQ ID NO: 2655 - DNA, 23 bp, Homo sapiens
  source 1..23: mol_type = genomic DNA
aatcttctattccctgagaaggg

SEQ ID NO: 2656 - DNA, 23 bp, Homo sapiens
  source 1..23: mol_type = genomic DNA
aatcttctattccctgaggaggg

SEQ ID NO: 2657 - DNA, 23 bp, Homo sapiens
  source 1..23: mol_type = genomic DNA
aatgaataggagattatcccagg

SEQ ID NO: 2658 - DNA, 23 bp, Homo sapiens
  source 1..23: mol_type = genomic DNA
aatgatgcccacaatggggatgg

SEQ ID NO: 2659 - DNA, 23 bp, Homo sapiens
  source 1..23: mol_type = genomic DNA
aatgatgcccacgatggggacgg

SEQ ID NO: 2660 - DNA, 23 bp, Homo sapiens
  source 1..23: mol_type = genomic DNA
aatgatgcccacgatggggatgg

SEQ ID NO: 2661 - DNA, 23 bp, Homo sapiens
  source 1..23: mol_type = genomic DNA
aatgatgcccacgatgtggacgg

SEQ ID NO: 2662 - DNA, 23 bp, Homo sapiens
  source 1..23: mol_type = genomic DNA
aatgcccacgatggggacggtgg

SEQ ID NO: 2663 - DNA, 23 bp, Homo sapiens
  source 1..23: mol_type = genomic DNA
aatgcccacgatggggatggtgg

SEQ ID NO: 2664 - DNA, 23 bp, Homo sapiens
  source 1..23: mol_type = genomic DNA
aatggacaggacacccgggatgg

SEQ ID NO: 2665 - DNA, 23 bp, Homo sapiens
  source 1..23: mol_type = genomic DNA
aatggacaggacacctgggatgg

SEQ ID NO: 2666 - DNA, 23 bp, Homo sapiens
  source 1..23: mol_type = genomic DNA
aatggacaggacacctggggtgg

SEQ ID NO: 2667 - DNA, 23 bp, Homo sapiens
  source 1..23: mol_type = genomic DNA
aatggacaggacacctggtgtgg

SEQ ID NO: 2668 - DNA, 23 bp, Homo sapiens
  source 1..23: mol_type = genomic DNA
aatggacgggacacctggggtgg

SEQ ID NO: 2669 - DNA, 23 bp, Homo sapiens
  source 1..23: mol_type = genomic DNA
aatggccacatgcgtgctggtgg

SEQ ID NO: 2670 - DNA, 23 bp, Homo sapiens
  source 1..23: mol_type = genomic DNA
aatgggcaggacacctggggtgg

SEQ ID NO: 2671 - DNA, 23 bp, Homo sapiens
  source 1..23: mol_type = genomic DNA
aatggggaggcgcagcgttgggg

SEQ ID NO: 2672 - DNA, 23 bp, Homo sapiens
  source 1..23: mol_type = genomic DNA
aatgtgccctgtctcattactgg

SEQ ID NO: 2673 - DNA, 23 bp, Homo sapiens
  source 1..23: mol_type = genomic DNA
aatgtgccctgtctcattcctgg

SEQ ID NO: 2674 - DNA, 23 bp, Homo sapiens
  source 1..23: mol_type = genomic DNA
aatgtgtgaatgcagacccaggg

SEQ ID NO: 2675 - DNA, 23 bp, Homo sapiens
  source 1..23: mol_type = genomic DNA
aatgtgtgactgcagacccaggg

SEQ ID NO: 2676 - DNA, 23 bp, Homo sapiens
  source 1..23: mol_type = genomic DNA
aatgtgtgttgggtgttgggcgg

SEQ ID NO: 2677 - DNA, 23 bp, Homo sapiens
  source 1..23: mol_type = genomic DNA
aattatgagcctacccagcctgg

SEQ ID NO: 2678 - DNA, 23 bp, Homo sapiens
  source 1..23: mol_type = genomic DNA
aattatgggcctacccagcctgg

SEQ ID NO: 2679 - DNA, 23 bp, Homo sapiens
  source 1..23: mol_type = genomic DNA
aattcatatccatcacagtgagg

SEQ ID NO: 2680 - DNA, 23 bp, Homo sapiens
  source 1..23: mol_type = genomic DNA
aattcgtatctgtcacagtgagg

SEQ ID NO: 2681 - DNA, 23 bp, Homo sapiens
  source 1..23: mol_type = genomic DNA
aattgagtcagagagcagggcgg

SEQ ID NO: 2682 - DNA, 23 bp, Homo sapiens
  source 1..23: mol_type = genomic DNA
aattgtcctagagagaagagggg

SEQ ID NO: 2683 - DNA, 23 bp, Homo sapiens
  source 1..23: mol_type = genomic DNA
aattgtcctagagagcagacggg

SEQ ID NO: 2684 - DNA, 23 bp, Homo sapiens
  source 1..23: mol_type = genomic DNA
aattgtcctagagagcagagggg

SEQ ID NO: 2685 - DNA, 23 bp, Homo sapiens
  source 1..23: mol_type = genomic DNA
aattgtctagagagaagaggggg

SEQ ID NO: 2686 - DNA, 23 bp, Homo sapiens
  source 1..23: mol_type = genomic DNA
aattgtgtcacagagcagggcgg

SEQ ID NO: 2687 - DNA, 23 bp, Homo sapiens
  source 1..23: mol_type = genomic DNA
aattgtgtcagagagcagggcgg

SEQ ID NO: 2688 - DNA, 23 bp, Homo sapiens
  source 1..23: mol_type = genomic DNA
acaagaacacagacacatgcagg

SEQ ID NO: 2689 - DNA, 23 bp, Homo sapiens
  source 1..23: mol_type = genomic DNA
acaagggtctcggagtcccgcgg

SEQ ID NO: 2690 - DNA, 23 bp, Homo sapiens
  source 1..23: mol_type = genomic DNA
acaatatcccagtgatttcttgg

SEQ ID NO: 2691 - DNA, 23 bp, Homo sapiens
  source 1..23: mol_type = genomic DNA
acacacacaggcagcagccttgg

SEQ ID NO: 2692 - DNA, 23 bp, Homo sapiens
  source 1..23: mol_type = genomic DNA
acacacaccggcagcagccttgg

SEQ ID NO: 2693 - DNA, 23 bp, Homo sapiens
  source 1..23: mol_type = genomic DNA
acacacaccggcggcagccttgg

SEQ ID NO: 2694 - DNA, 23 bp, Homo sapiens
  source 1..23: mol_type = genomic DNA
acacagctccaaagagaactagg

SEQ ID NO: 2695 - DNA, 23 bp, Homo sapiens
  source 1..23: mol_type = genomic DNA
acacagggcccagactgggtagg

SEQ ID NO: 2696 - DNA, 23 bp, Homo sapiens
  source 1..23: mol_type = genomic DNA
acacagggcccaggctgggtagg

SEQ ID NO: 2697 - DNA, 23 bp, Homo sapiens
  source 1..23: mol_type = genomic DNA
acacagggcccaggctgggtcgg

SEQ ID NO: 2698 - DNA, 23 bp, Homo sapiens
  source 1..23: mol_type = genomic DNA
acacagggcccaggctgggtggg

SEQ ID NO: 2699 - DNA, 23 bp, Homo sapiens
  source 1..23: mol_type = genomic DNA
acacaggggctaacacagcctgg

SEQ ID NO: 2700 - DNA, 23 bp, Homo sapiens
  source 1..23: mol_type = genomic DNA
acacaggggctaacgcagactgg

SEQ ID NO: 2701 - DNA, 23 bp, Homo sapiens
  source 1..23: mol_type = genomic DNA
acacaggggctaacgcagcctgg

SEQ ID NO: 2702 - DNA, 23 bp, Homo sapiens
  source 1..23: mol_type = genomic DNA
acacaggggctaatgcagcctgg

SEQ ID NO: 2703 - DNA, 23 bp, Homo sapiens
  source 1..23: mol_type = genomic DNA
acacatgggccatcccagcctgg

SEQ ID NO: 2704 - DNA, 23 bp, Homo sapiens
  source 1..23: mol_type = genomic DNA
acacatgtgacaatgaaggacgg

SEQ ID NO: 2705 - DNA, 23 bp, Homo sapiens
  source 1..23: mol_type = genomic DNA
acaccgagcttgtggagaccagg

SEQ ID NO: 2706 - DNA, 23 bp, Homo sapiens
  source 1..23: mol_type = genomic DNA
acacctcagccccacctctctgg

SEQ ID NO: 2707 - DNA, 23 bp, Homo sapiens
  source 1..23: mol_type = genomic DNA
acacctgggccatcccagcctgg

SEQ ID NO: 2708 - DNA, 23 bp, Homo sapiens
  source 1..23: mol_type = genomic DNA
acacgaacacagacacatgcagg

SEQ ID NO: 2709 - DNA, 23 bp, Homo sapiens
  source 1..23: mol_type = genomic DNA
acacggagctcgtggagaccagg

SEQ ID NO: 2710 - DNA, 23 bp, Homo sapiens
  source 1..23: mol_type = genomic DNA
acacggagcttgtggagaccagg

SEQ ID NO: 2711 - DNA, 23 bp, Homo sapiens
  source 1..23: mol_type = genomic DNA
acacgtgggccatcccagcctgg

SEQ ID NO: 2712 - DNA, 23 bp, Homo sapiens
  source 1..23: mol_type = genomic DNA
acactccaccagcacgcatgtgg

SEQ ID NO: 2713 - DNA, 23 bp, Homo sapiens
  source 1..23: mol_type = genomic DNA
acactccaccagcatgcatgtgg

SEQ ID NO: 2714 - DNA, 23 bp, Homo sapiens
  source 1..23: mol_type = genomic DNA
acactcctccagcacacatgtgg

SEQ ID NO: 2715 - DNA, 23 bp, Homo sapiens
  source 1..23: mol_type = genomic DNA
acactgacctggcagcgggatgg

SEQ ID NO: 2716 - DNA, 23 bp, Homo sapiens
  source 1..23: mol_type = genomic DNA
acactgacctggcagtgggatgg

SEQ ID NO: 2717 - DNA, 23 bp, Homo sapiens
  source 1..23: mol_type = genomic DNA
acactgagcttgtggagaccagg

SEQ ID NO: 2718 - DNA, 23 bp, Homo sapiens
  source 1..23: mol_type = genomic DNA
acagaacatgtggctagaggagg

SEQ ID NO: 2719 - DNA, 23 bp, Homo sapiens
  source 1..23: mol_type = genomic DNA
acagaacccagacaccagcctgg

SEQ ID NO: 2720 - DNA, 23 bp, Homo sapiens
  source 1..23: mol_type = genomic DNA
acagaacccagacgccagcctgg

SEQ ID NO: 2721 - DNA, 23 bp, Homo sapiens
  source 1..23: mol_type = genomic DNA
acagaagatgtggctagaggagg

SEQ ID NO: 2722 - DNA, 23 bp, Homo sapiens
  source 1..23: mol_type = genomic DNA
acagaatctggaaacccaggagg

SEQ ID NO: 2723 - DNA, 23 bp, Homo sapiens
  source 1..23: mol_type = genomic DNA
acagacctcaggagggcggttgg

SEQ ID NO: 2724 - DNA, 23 bp, Homo sapiens
  source 1..23: mol_type = genomic DNA
acagacctcaggagggctattgg

SEQ ID NO: 2725 - DNA, 23 bp, Homo sapiens
  source 1..23: mol_type = genomic DNA
acagaccttaggagagcagttgg

SEQ ID NO: 2726 - DNA, 23 bp, Homo sapiens
  source 1..23: mol_type = genomic DNA
acagaccttaggagggcagttgg

SEQ ID NO: 2727 - DNA, 23 bp, Homo sapiens
  source 1..23: mol_type = genomic DNA
acagactaaccgagcgaacctgg

SEQ ID NO: 2728 - DNA, 23 bp, Homo sapiens
  source 1..23: mol_type = genomic DNA
acagactcaccgagtggacctgg

SEQ ID NO: 2729 - DNA, 23 bp, Homo sapiens
  source 1..23: mol_type = genomic DNA
acagactgaccgagagaacctgg

SEQ ID NO: 2730 - DNA, 23 bp, Homo sapiens
  source 1..23: mol_type = genomic DNA
acagactgaccgagcgaacctgg

SEQ ID NO: 2731 - DNA, 23 bp, Homo sapiens
  source 1..23: mol_type = genomic DNA
acagactgaccgagtggacctgg

SEQ ID NO: 2732 - DNA, 23 bp, Homo sapiens
  source 1..23: mol_type = genomic DNA
acagatctcaggagggcgattgg

SEQ ID NO: 2733 - DNA, 23 bp, Homo sapiens
  source 1..23: mol_type = genomic DNA
acagattgaccgagtggacctgg

SEQ ID NO: 2734 - DNA, 23 bp, Homo sapiens
  source 1..23: mol_type = genomic DNA
acagcacgcctacgacggcaagg

SEQ ID NO: 2735 - DNA, 23 bp, Homo sapiens
  source 1..23: mol_type = genomic DNA
acagcgacgccacgagtccgagg

SEQ ID NO: 2736 - DNA, 23 bp, Homo sapiens
  source 1..23: mol_type = genomic DNA
acagcgacgccgcgagccagagg

SEQ ID NO: 2737 - DNA, 23 bp, Homo sapiens
  source 1..23: mol_type = genomic DNA
acagcgacgccgcgagccggagg

SEQ ID NO: 2738 - DNA, 23 bp, Homo sapiens
  source 1..23: mol_type = genomic DNA
acagcgacgccgcgagtccgagg

SEQ ID NO: 2739 - DNA, 23 bp, Homo sapiens
  source 1..23: mol_type = genomic DNA
acagctgtggtggtgccttctgg

SEQ ID NO: 2740 - DNA, 23 bp, Homo sapiens
  source 1..23: mol_type = genomic DNA
acaggaaagatgattggagaggg

SEQ ID NO: 2741 - DNA, 23 bp, Homo sapiens
  source 1..23: mol_type = genomic DNA
acaggaaagatgattggggaggg

SEQ ID NO: 2742 - DNA, 23 bp, Homo sapiens
  source 1..23: mol_type = genomic DNA
acaggaacgcagacacattcagg

SEQ ID NO: 2743 - DNA, 23 bp, Homo sapiens
  source 1..23: mol_type = genomic DNA
acaggacattttcttcccacagg

SEQ ID NO: 2744 - DNA, 23 bp, Homo sapiens
  source 1..23: mol_type = genomic DNA
acaggatctggaaacccaggagg

SEQ ID NO: 2745 - DNA, 23 bp, Homo sapiens
  source 1..23: mol_type = genomic DNA
acaggcccaggtctcggtcaggg

SEQ ID NO: 2746 - DNA, 23 bp, Homo sapiens
  source 1..23: mol_type = genomic DNA
acagggacacagacacattcagg

SEQ ID NO: 2747 - DNA, 23 bp, Homo sapiens
  source 1..23: mol_type = genomic DNA
acagggacgcagacacattcagg

SEQ ID NO: 2748 - DNA, 23 bp, Homo sapiens
  source 1..23: mol_type = genomic DNA
acagggcacatttctagctgggg

SEQ ID NO: 2749 - DNA, 23 bp, Homo sapiens
  source 1..23: mol_type = genomic DNA
acagggcattttcttcccacagg

SEQ ID NO: 2750 - DNA, 23 bp, Homo sapiens
  source 1..23: mol_type = genomic DNA
acatagctccaaagagaactagg

SEQ ID NO: 2751 - DNA, 23 bp, Homo sapiens
  source 1..23: mol_type = genomic DNA
acatgaacacagacacatgcagg

SEQ ID NO: 2752 - DNA, 23 bp, Homo sapiens
  source 1..23: mol_type = genomic DNA
acatgccatgtacagcatgaggg

SEQ ID NO: 2753 - DNA, 23 bp, Homo sapiens
  source 1..23: mol_type = genomic DNA
acatgtggctatcttgagaatgg

SEQ ID NO: 2754 - DNA, 23 bp, Homo sapiens
  source 1..23: mol_type = genomic DNA
acatttctggaaacttctctggg

SEQ ID NO: 2755 - DNA, 23 bp, Homo sapiens
  source 1..23: mol_type = genomic DNA
accacatccgtgtcccggcccgg

SEQ ID NO: 2756 - DNA, 23 bp, Homo sapiens
  source 1..23: mol_type = genomic DNA
accagcagtcacaagtcacaggg

SEQ ID NO: 2757 - DNA, 23 bp, Homo sapiens
  source 1..23: mol_type = genomic DNA
accagcccaggtctcggtcaggg

SEQ ID NO: 2758 - DNA, 23 bp, Homo sapiens
  source 1..23: mol_type = genomic DNA
accagcggatgcaggcacctggg

SEQ ID NO: 2759 - DNA, 23 bp, Homo sapiens
  source 1..23: mol_type = genomic DNA
acccaatgggagtgagaactggg

SEQ ID NO: 2760 - DNA, 23 bp, Homo sapiens
  source 1..23: mol_type = genomic DNA
acccaatgggagtgggaaatggg

SEQ ID NO: 2761 - DNA, 23 bp, Homo sapiens
  source 1..23: mol_type = genomic DNA
acccaatgggagtgggaagtggg

SEQ ID NO: 2762 - DNA, 23 bp, Homo sapiens
  source 1..23: mol_type = genomic DNA
acccaatgggagtgggaattggg

SEQ ID NO: 2763 - DNA, 23 bp, Homo sapiens
  source 1..23: mol_type = genomic DNA
acccagacaccagcggatgcagg

SEQ ID NO: 2764 - DNA, 23 bp, Homo sapiens
  source 1..23: mol_type = genomic DNA
acccagaccagcctggacacagg

SEQ ID NO: 2765 - DNA, 23 bp, Homo sapiens
  source 1..23: mol_type = genomic DNA
acccagggcccagcacctcaggg

SEQ ID NO: 2766 - DNA, 23 bp, Homo sapiens
  source 1..23: mol_type = genomic DNA
acccagttctcactcccattggg

SEQ ID NO: 2767 - DNA, 23 bp, Homo sapiens
  source 1..23: mol_type = genomic DNA
acccctcatcccccacggacggg

SEQ ID NO: 2768 - DNA, 23 bp, Homo sapiens
  source 1..23: mol_type = genomic DNA
acccctcatcccctacggacggg

SEQ ID NO: 2769 - DNA, 23 bp, Homo sapiens
  source 1..23: mol_type = genomic DNA
acccgacacccaatgggagtggg

SEQ ID NO: 2770 - DNA, 23 bp, Homo sapiens
  source 1..23: mol_type = genomic DNA
acccgaccctcctcccggcgcgg

SEQ ID NO: 2771 - DNA, 23 bp, Homo sapiens
  source 1..23: mol_type = genomic DNA
acccgcccaggtctgggtcaggg

SEQ ID NO: 2772 - DNA, 23 bp, Homo sapiens
  source 1..23: mol_type = genomic DNA
acccgccctggtctgggtcaggg

SEQ ID NO: 2773 - DNA, 23 bp, Homo sapiens
  source 1..23: mol_type = genomic DNA
acccgcggaggaggcgcccgtgg

SEQ ID NO: 2774 - DNA, 23 bp, Homo sapiens
  source 1..23: mol_type = genomic DNA
acccgggaagccgcgccgggagg

SEQ ID NO: 2775 - DNA, 23 bp, Homo sapiens
  source 1..23: mol_type = genomic DNA
acccgggaagccgcgcctggagg

SEQ ID NO: 2776 - DNA, 23 bp, Homo sapiens
  source 1..23: mol_type = genomic DNA
acccggggagccgcgcagggagg

SEQ ID NO: 2777 - DNA, 23 bp, Homo sapiens
  source 1..23: mol_type = genomic DNA
acccggggagccgcgccgggagg

SEQ ID NO: 2778 - DNA, 23 bp, Homo sapiens
  source 1..23: mol_type = genomic DNA
acccggggagcggcgcagggagg

SEQ ID NO: 2779 - DNA, 23 bp, Homo sapiens
  source 1..23: mol_type = genomic DNA
acccgggtagccgcgccgggagg

SEQ ID NO: 2780 - DNA, 23 bp, Homo sapiens
  source 1..23: mol_type = genomic DNA
accctacataggttggcagaggg

SEQ ID NO: 2781 - DNA, 23 bp, Homo sapiens
  source 1..23: mol_type = genomic DNA
accctacataggttgggagaggg

SEQ ID NO: 2782 - DNA, 23 bp, Homo sapiens
  source 1..23: mol_type = genomic DNA
accctacgtaggttgggagaggg

SEQ ID NO: 2783 - DNA, 23 bp, Homo sapiens
  source 1..23: mol_type = genomic DNA
accctcatcctgctgctctcggg

SEQ ID NO: 2784 - DNA, 23 bp, Homo sapiens
  source 1..23: mol_type = genomic DNA
accctcatgctgcacatggcagg

SEQ ID NO: 2785 - DNA, 23 bp, Homo sapiens
  source 1..23: mol_type = genomic DNA
accctcctcctgctactctcggg

SEQ ID NO: 2786 - DNA, 23 bp, Homo sapiens
  source 1..23: mol_type = genomic DNA
accctcctcctgctactcttggg

SEQ ID NO: 2787 - DNA, 23 bp, Homo sapiens
  source 1..23: mol_type = genomic DNA
accctcctcctgctgctctcggg

SEQ ID NO: 2788 - DNA, 23 bp, Homo sapiens
  source 1..23: mol_type = genomic DNA
accctcctcctgctgctctgggg

SEQ ID NO: 2789 - DNA, 23 bp, Homo sapiens
  source 1..23: mol_type = genomic DNA
accctcgtcctgctactctcggg

SEQ ID NO: 2790 - DNA, 23 bp, Homo sapiens
  source 1..23: mol_type = genomic DNA
accctgagatggagtaaggaggg

SEQ ID NO: 2791 - DNA, 23 bp, Homo sapiens
  source 1..23: mol_type = genomic DNA
accctgagatggggtaaggaggg

SEQ ID NO: 2792 - DNA, 23 bp, Homo sapiens
  source 1..23: mol_type = genomic DNA
accctgagctggggtaaggaggg

SEQ ID NO: 2793 - DNA, 23 bp, Homo sapiens
  source 1..23: mol_type = genomic DNA
accctgaggtgctgggccctggg

SEQ ID NO: 2794 - DNA, 23 bp, Homo sapiens
  source 1..23: mol_type = genomic DNA
accggcccaggtctcgatcaggg

SEQ ID NO: 2795 - DNA, 23 bp, Homo sapiens
  source 1..23: mol_type = genomic DNA
accggcccaggtctcggtcaggg

SEQ ID NO: 2796 - DNA, 23 bp, Homo sapiens
  source 1..23: mol_type = genomic DNA
accgggctgaccacgggggcggg

SEQ ID NO: 2797 - DNA, 23 bp, Homo sapiens
  source 1..23: mol_type = genomic DNA
accgggctgaccgcggggtccgg

SEQ ID NO: 2798 - DNA, 23 bp, Homo sapiens
  source 1..23: mol_type = genomic DNA
accgggctgaccgcggggtcggg

SEQ ID NO: 2799 - DNA, 23 bp, Homo sapiens
  source 1..23: mol_type = genomic DNA
accgggctgacctcggggtccgg

SEQ ID NO: 2800 - DNA, 23 bp, Homo sapiens
  source 1..23: mol_type = genomic DNA
accgggggagccgcgccgggagg

SEQ ID NO: 2801 - DNA, 23 bp, Homo sapiens
  source 1..23: mol_type = genomic DNA
accggtccaggtctcgatcaggg

SEQ ID NO: 2802 - DNA, 23 bp, Homo sapiens
  source 1..23: mol_type = genomic DNA
accgtcctcctgctgctctcggg

SEQ ID NO: 2803 - DNA, 23 bp, Homo sapiens
  source 1..23: mol_type = genomic DNA
accgtcctcctgctgctctgggg

SEQ ID NO: 2804 - DNA, 23 bp, Homo sapiens
  source 1..23: mol_type = genomic DNA
acctaatgtgtgttgggtgttgg

SEQ ID NO: 2805 - DNA, 23 bp, Homo sapiens
  source 1..23: mol_type = genomic DNA
acctcatggagtgagagcctggg

SEQ ID NO: 2806 - DNA, 23 bp, Homo sapiens
  source 1..23: mol_type = genomic DNA
acctcatggagtgggagactggg

SEQ ID NO: 2807 - DNA, 23 bp, Homo sapiens
  source 1..23: mol_type = genomic DNA
acctcatggagtgggagcctggg

SEQ ID NO: 2808 - DNA, 23 bp, Homo sapiens
  source 1..23: mol_type = genomic DNA
acctcatggattgggagcctggg

SEQ ID NO: 2809 - DNA, 23 bp, Homo sapiens
  source 1..23: mol_type = genomic DNA
acctccctgcgcggctccccggg

SEQ ID NO: 2810 - DNA, 23 bp, Homo sapiens
  source 1..23: mol_type = genomic DNA
acctcgatggttgtggtgttggg

SEQ ID NO: 2811 - DNA, 23 bp, Homo sapiens
  source 1..23: mol_type = genomic DNA
acctctcatcccccacggacggg

SEQ ID NO: 2812 - DNA, 23 bp, Homo sapiens
  source 1..23: mol_type = genomic DNA
acctgaggagccgcgccgggagg

SEQ ID NO: 2813 - DNA, 23 bp, Homo sapiens
  source 1..23: mol_type = genomic DNA
acctgccatgtgcagcatgaggg

SEQ ID NO: 2814 - DNA, 23 bp, Homo sapiens
  source 1..23: mol_type = genomic DNA
acctgcccaggtctgggtcaggg

SEQ ID NO: 2815 - DNA, 23 bp, Homo sapiens
  source 1..23: mol_type = genomic DNA
acctgcgcggctactacaaccgg

SEQ ID NO: 2816 - DNA, 23 bp, Homo sapiens
  source 1..23: mol_type = genomic DNA
acctggatgatgtgagaccctgg

SEQ ID NO: 2817 - DNA, 23 bp, Homo sapiens
  source 1..23: mol_type = genomic DNA
acctgggataatctattcattgg

SEQ ID NO: 2818 - DNA, 23 bp, Homo sapiens
  source 1..23: mol_type = genomic DNA
accttgatgattatggtgttggg

SEQ ID NO: 2819 - DNA, 23 bp, Homo sapiens
  source 1..23: mol_type = genomic DNA
accttgatggttgtggtgttggg

SEQ ID NO: 2820 - DNA, 23 bp, Homo sapiens
  source 1..23: mol_type = genomic DNA
accttgattacagcggtgatggg

SEQ ID NO: 2821 - DNA, 23 bp, Homo sapiens
  source 1..23: mol_type = genomic DNA
accttgattacggcagtgatggg

SEQ ID NO: 2822 - DNA, 23 bp, Homo sapiens
  source 1..23: mol_type = genomic DNA
accttgattacggcggtgatggg

SEQ ID NO: 2823 - DNA, 23 bp, Homo sapiens
  source 1..23: mol_type = genomic DNA
accttgattatggcggtgatggg

SEQ ID NO: 2824 - DNA, 23 bp, Homo sapiens
  source 1..23: mol_type = genomic DNA
accttggggtggatctcagacgg

SEQ ID NO: 2825 - DNA, 23 bp, Homo sapiens
  source 1..23: mol_type = genomic DNA
accttggtggttgtggtgttggg

SEQ ID NO: 2826 - DNA, 23 bp, Homo sapiens
  source 1..23: mol_type = genomic DNA
acgaagtcccaggccccgggcgg

SEQ ID NO: 2827 - DNA, 23 bp, Homo sapiens
  source 1..23: mol_type = genomic DNA
acgaagtcccaggtcccggacgg

SEQ ID NO: 2828 - DNA, 23 bp, Homo sapiens
  source 1..23: mol_type = genomic DNA
acgaagtcccaggtcccgggcgg

SEQ ID NO: 2829 - DNA, 23 bp, Homo sapiens
  source 1..23: mol_type = genomic DNA
acgaagtcccatgtcccggacgg

SEQ ID NO: 2830 - DNA, 23 bp, Homo sapiens
  source 1..23: mol_type = genomic DNA
acgacactgattggcttctctgg

SEQ ID NO: 2831 - DNA, 23 bp, Homo sapiens
  source 1..23: mol_type = genomic DNA
acgaggtgcccgcccggcgaggg

SEQ ID NO: 2832 - DNA, 23 bp, Homo sapiens
  source 1..23: mol_type = genomic DNA
acgatgtacggctgcgacgtggg

SEQ ID NO: 2833 - DNA, 23 bp, Homo sapiens
  source 1..23: mol_type = genomic DNA
acgatgtatggctgcgacctggg

SEQ ID NO: 2834 - DNA, 23 bp, Homo sapiens
  source 1..23: mol_type = genomic DNA
acgatgtatggctgcgacgtggg

SEQ ID NO: 2835 - DNA, 23 bp, Homo sapiens
  source 1..23: mol_type = genomic DNA
acgctgcagcgcacgggtaccgg

SEQ ID NO: 2836 - DNA, 23 bp, Homo sapiens
  source 1..23: mol_type = genomic DNA
acggaataggagattatcccagg

SEQ ID NO: 2837 - DNA, 23 bp, Homo sapiens
  source 1..23: mol_type = genomic DNA
acggacaggacacctggggtggg

SEQ ID NO: 2838 - DNA, 23 bp, Homo sapiens
  source 1..23: mol_type = genomic DNA
acggccatcctcggcgtctgggg

SEQ ID NO: 2839 - DNA, 23 bp, Homo sapiens
  source 1..23: mol_type = genomic DNA
acggccatcctcggggtctgggg

SEQ ID NO: 2840 - DNA, 23 bp, Homo sapiens
  source 1..23: mol_type = genomic DNA
acgggctgaccacgggggcgggg

SEQ ID NO: 2841 - DNA, 23 bp, Homo sapiens
  source 1..23: mol_type = genomic DNA
acggggctgaccacgggggcggg

SEQ ID NO: 2842 - DNA, 23 bp, Homo sapiens
  source 1..23: mol_type = genomic DNA
acggggctgaccgcggggccggg

SEQ ID NO: 2843 - DNA, 23 bp, Homo sapiens
  source 1..23: mol_type = genomic DNA
acggggctgaccgcggggcctgg

SEQ ID NO: 2844 - DNA, 23 bp, Homo sapiens
  source 1..23: mol_type = genomic DNA
acggggctgaccgcgggggcggg

SEQ ID NO: 2845 - DNA, 23 bp, Homo sapiens
  source 1..23: mol_type = genomic DNA
acgggggtgtcatgtcttttagg

SEQ ID NO: 2846 - DNA, 23 bp, Homo sapiens
  source 1..23: mol_type = genomic DNA
acggtgagtgaccccggcccggg

SEQ ID NO: 2847 - DNA, 23 bp, Homo sapiens
  source 1..23: mol_type = genomic DNA
acggtgctgaccgcggggccggg

SEQ ID NO: 2848 - DNA, 23 bp, Homo sapiens
  source 1..23: mol_type = genomic DNA
acggttcccaaggctgctgcagg

SEQ ID NO: 2849 - DNA, 23 bp, Homo sapiens
  source 1..23: mol_type = genomic DNA
acgtctctgaggaaatggagggg

SEQ ID NO: 2850 - DNA, 23 bp, Homo sapiens
  source 1..23: mol_type = genomic DNA
acgtctctgaggaaatgtagggg

SEQ ID NO: 2851 - DNA, 23 bp, Homo sapiens
  source 1..23: mol_type = genomic DNA
acgtgccatatgcagcacgaggg

SEQ ID NO: 2852 - DNA, 23 bp, Homo sapiens
  source 1..23: mol_type = genomic DNA
acgtgccatgtgcagcacgaggg

SEQ ID NO: 2853 - DNA, 23 bp, Homo sapiens
  source 1..23: mol_type = genomic DNA
acgtgccatgttcagcacgaggg

SEQ ID NO: 2854 - DNA, 23 bp, Homo sapiens
  source 1..23: mol_type = genomic DNA
acgtgggacaggaggaattaggg

SEQ ID NO: 2855 - DNA, 23 bp, Homo sapiens
  source 1..23: mol_type = genomic DNA
acgtgggacaggaggaattatgg

SEQ ID NO: 2856 - DNA, 23 bp, Homo sapiens
  source 1..23: mol_type = genomic DNA
actagaactttccaaagaatagg

SEQ ID NO: 2857 - DNA, 23 bp, Homo sapiens
  source 1..23: mol_type = genomic DNA
actagaactttccaatgaatagg

SEQ ID NO: 2858 - DNA, 23 bp, Homo sapiens
  source 1..23: mol_type = genomic DNA
actagaattttccacggaatagg

SEQ ID NO: 2859 - DNA, 23 bp, Homo sapiens
  source 1..23: mol_type = genomic DNA
actagggctctctccggtcgagg

SEQ ID NO: 2860 - DNA, 23 bp, Homo sapiens
  source 1..23: mol_type = genomic DNA
actcatgaatgctggaatcaagg

SEQ ID NO: 2861 - DNA, 23 bp, Homo sapiens
  source 1..23: mol_type = genomic DNA
actccacgcacaggccctccagg

SEQ ID NO: 2862 - DNA, 23 bp, Homo sapiens
  source 1..23: mol_type = genomic DNA
actccacgcaccggccctccagg

SEQ ID NO: 2863 - DNA, 23 bp, Homo sapiens
  source 1..23: mol_type = genomic DNA
actccacgcacgtgccatccagg

SEQ ID NO: 2864 - DNA, 23 bp, Homo sapiens
  source 1..23: mol_type = genomic DNA
actccacgcacgtgccctccagg

SEQ ID NO: 2865 - DNA, 23 bp, Homo sapiens
  source 1..23: mol_type = genomic DNA
actccacgcactcgccctccagg

SEQ ID NO: 2866 - DNA, 23 bp, Homo sapiens
  source 1..23: mol_type = genomic DNA
actccctccttttctatctgtgg

SEQ ID NO: 2867 - DNA, 23 bp, Homo sapiens
  source 1..23: mol_type = genomic DNA
actcctcatattatgctaacagg

SEQ ID NO: 2868 - DNA, 23 bp, Homo sapiens
  source 1..23: mol_type = genomic DNA
actcctccctgtcccctcacagg

SEQ ID NO: 2869 - DNA, 23 bp, Homo sapiens
  source 1..23: mol_type = genomic DNA
actcctttctggtatctcacagg

SEQ ID NO: 2870 - DNA, 23 bp, Homo sapiens
  source 1..23: mol_type = genomic DNA
actcgaaacgtcccaatcaaagg

SEQ ID NO: 2871 - DNA, 23 bp, Homo sapiens
  source 1..23: mol_type = genomic DNA
actcgaactttccaatgaatagg

SEQ ID NO: 2872 - DNA, 23 bp, Homo sapiens
  source 1..23: mol_type = genomic DNA
actctcaggctgcgtgtaagtgg

SEQ ID NO: 2873 - DNA, 23 bp, Homo sapiens
  source 1..23: mol_type = genomic DNA
actctgagatgctgggccctggg

SEQ ID NO: 2874 - DNA, 23 bp, Homo sapiens
  source 1..23: mol_type = genomic DNA
actgacctggcagcgggatgggg

SEQ ID NO: 2875 - DNA, 23 bp, Homo sapiens
  source 1..23: mol_type = genomic DNA
actgacctggcagtgggatgggg

SEQ ID NO: 2876 - DNA, 23 bp, Homo sapiens
  source 1..23: mol_type = genomic DNA
actgggctgaccgcggggccggg

SEQ ID NO: 2877 - DNA, 23 bp, Homo sapiens
  source 1..23: mol_type = genomic DNA
actgggctgaccgcgggggcggg

SEQ ID NO: 2878 - DNA, 23 bp, Homo sapiens
  source 1..23: mol_type = genomic DNA
actgggctgaccgcggggtcggg

SEQ ID NO: 2879 - DNA, 23 bp, Homo sapiens
  source 1..23: mol_type = genomic DNA
actgggctgaccgtggggtcggg

SEQ ID NO: 2880 - DNA, 23 bp, Homo sapiens
  source 1..23: mol_type = genomic DNA
actggggaggcgccgcgttgagg

SEQ ID NO: 2881 - DNA, 23 bp, Homo sapiens
  source 1..23: mol_type = genomic DNA
actggggaggcgccgcgttgggg

SEQ ID NO: 2882 - DNA, 23 bp, Homo sapiens
  source 1..23: mol_type = genomic DNA
actggggctctctccggccgagg

SEQ ID NO: 2883 - DNA, 23 bp, Homo sapiens
  source 1..23: mol_type = genomic DNA
actggggctctctccggtcgagg

SEQ ID NO: 2884 - DNA, 23 bp, Homo sapiens
  source 1..23: mol_type = genomic DNA
actgggtaggcccatgattgtgg

SEQ ID NO: 2885 - DNA, 23 bp, Homo sapiens
  source 1..23: mol_type = genomic DNA
actggtcatacccgcggaggagg

SEQ ID NO: 2886 - DNA, 23 bp, Homo sapiens
  source 1..23: mol_type = genomic DNA
actggtcatgcccgcggaggagg

SEQ ID NO: 2887 - DNA, 23 bp, Homo sapiens
  source 1..23: mol_type = genomic DNA
actggttatacccgcggaggagg

SEQ ID NO: 2888 - DNA, 23 bp, Homo sapiens
  source 1..23: mol_type = genomic DNA
actggttatgcccgcggaggagg

SEQ ID NO: 2889 - DNA, 23 bp, Homo sapiens
  source 1..23: mol_type = genomic DNA
acttcaagtcacaaagggaaggg

SEQ ID NO: 2890 - DNA, 23 bp, Homo sapiens
  source 1..23: mol_type = genomic DNA
acttcatatctgtcacagtgagg

SEQ ID NO: 2891 - DNA, 23 bp, Homo sapiens
  source 1..23: mol_type = genomic DNA
acttcatggagtgggagcctggg

SEQ ID NO: 2892 - DNA, 23 bp, Homo sapiens
  source 1..23: mol_type = genomic DNA
acttctgctcccgatctgagtgg

SEQ ID NO: 2893 - DNA, 23 bp, Homo sapiens
  source 1..23: mol_type = genomic DNA
acttctgctcctgatctaagtgg

SEQ ID NO: 2894 - DNA, 23 bp, Homo sapiens
  source 1..23: mol_type = genomic DNA
acttctgctcctgatctgagtgg

SEQ ID NO: 2895 - DNA, 23 bp, Homo sapiens
  source 1..23: mol_type = genomic DNA
acttctggtcctgacctgagtgg

SEQ ID NO: 2896 - DNA, 23 bp, Homo sapiens
  source 1..23: mol_type = genomic DNA
acttgtaaaggtgagattctggg

SEQ ID NO: 2897 - DNA, 23 bp, Homo sapiens
  source 1..23: mol_type = genomic DNA
actttacctccactcagatcagg

SEQ ID NO: 2898 - DNA, 23 bp, Homo sapiens
  source 1..23: mol_type = genomic DNA
actttacctccactcagatcggg

SEQ ID NO: 2899 - DNA, 23 bp, Homo sapiens
  source 1..23: mol_type = genomic DNA
actttacctccacttagatcagg

SEQ ID NO: 2900 - DNA, 23 bp, Homo sapiens
  source 1..23: mol_type = genomic DNA
agaaaagaaactgcggagttggg

SEQ ID NO: 2901 - DNA, 23 bp, Homo sapiens
  source 1..23: mol_type = genomic DNA
agaaaggagccagggccttaagg

SEQ ID NO: 2902 - DNA, 23 bp, Homo sapiens
  source 1..23: mol_type = genomic DNA
agaaaggagtcagggccttaagg

SEQ ID NO: 2903 - DNA, 23 bp, Homo sapiens
  source 1..23: mol_type = genomic DNA
agaacctggccccgaccccacgg

SEQ ID NO: 2904 - DNA, 23 bp, Homo sapiens
  source 1..23: mol_type = genomic DNA
agaacctggccccgaccccgcgg

SEQ ID NO: 2905 - DNA, 23 bp, Homo sapiens
  source 1..23: mol_type = genomic DNA
agaacctggccccgcccccgtgg

SEQ ID NO: 2906 - DNA, 23 bp, Homo sapiens
  source 1..23: mol_type = genomic DNA
agaacctggcccggaccccgagg

SEQ ID NO: 2907 - DNA, 23 bp, Homo sapiens
  source 1..23: mol_type = genomic DNA
agaacctggcccggaccccgcgg

SEQ ID NO: 2908 - DNA, 23 bp, Homo sapiens
  source 1..23: mol_type = genomic DNA
agaacgaggacctgcgctcctgg

SEQ ID NO: 2909 - DNA, 23 bp, Homo sapiens
  source 1..23: mol_type = genomic DNA
agaactacgactgcagacccagg

SEQ ID NO: 2910 - DNA, 23 bp, Homo sapiens
  source 1..23: mol_type = genomic DNA
agaactatgactgcagacccagg

SEQ ID NO: 2911 - DNA, 23 bp, Homo sapiens
  source 1..23: mol_type = genomic DNA
agaagagctcaggtggagaaggg

SEQ ID NO: 2912 - DNA, 23 bp, Homo sapiens
  source 1..23: mol_type = genomic DNA
agaagccaatcagcgtcgccggg

SEQ ID NO: 2913 - DNA, 23 bp, Homo sapiens
  source 1..23: mol_type = genomic DNA
agaagccaatcagtgtcgccggg

SEQ ID NO: 2914 - DNA, 23 bp, Homo sapiens
  source 1..23: mol_type = genomic DNA
agaaggacccgacacaagttggg

SEQ ID NO: 2915 - DNA, 23 bp, Homo sapiens
  source 1..23: mol_type = genomic DNA
agaaggacccgacacaggttggg

SEQ ID NO: 2916 - DNA, 23 bp, Homo sapiens
  source 1..23: mol_type = genomic DNA
agaaggacccgacataggttggg

SEQ ID NO: 2917 - DNA, 23 bp, Homo sapiens
  source 1..23: mol_type = genomic DNA
agaaggacccgacgcaggttggg

SEQ ID NO: 2918 - DNA, 23 bp, Homo sapiens
  source 1..23: mol_type = genomic DNA
agaaggacccgtcgcaggttggg

SEQ ID NO: 2919 - DNA, 23 bp, Homo sapiens
  source 1..23: mol_type = genomic DNA
agaaggaccctacataggttggg

SEQ ID NO: 2920 - DNA, 23 bp, Homo sapiens
  source 1..23: mol_type = genomic DNA
agaagtatgactacagacccagg

SEQ ID NO: 2921 - DNA, 23 bp, Homo sapiens
  source 1..23: mol_type = genomic DNA
agaagtcccaggtcccgggcggg

SEQ ID NO: 2922 - DNA, 23 bp, Homo sapiens
  source 1..23: mol_type = genomic DNA
agaagtgaaactcaggggagtgg

SEQ ID NO: 2923 - DNA, 23 bp, Homo sapiens
  source 1..23: mol_type = genomic DNA
agaagtgaaactcgtgggagtgg

SEQ ID NO: 2924 - DNA, 23 bp, Homo sapiens
  source 1..23: mol_type = genomic DNA
agacaccgagatgcgggtcacgg

SEQ ID NO: 2925 - DNA, 23 bp, Homo sapiens
  source 1..23: mol_type = genomic DNA
agacactttgcatctctcttggg

SEQ ID NO: 2926 - DNA, 23 bp, Homo sapiens
  source 1..23: mol_type = genomic DNA
agacagaaccttccagaagtggg

SEQ ID NO: 2927 - DNA, 23 bp, Homo sapiens
  source 1..23: mol_type = genomic DNA
agacagctctgggaaaagagggg

SEQ ID NO: 2928 - DNA, 23 bp, Homo sapiens
  source 1..23: mol_type = genomic DNA
agacagggcacatttctagctgg

SEQ ID NO: 2929 - DNA, 23 bp, Homo sapiens
  source 1..23: mol_type = genomic DNA
agaccaggcctgcaggggatggg

SEQ ID NO: 2930 - DNA, 23 bp, Homo sapiens
  source 1..23: mol_type = genomic DNA
agaccagggcgggtgagtgcggg

SEQ ID NO: 2931 - DNA, 23 bp, Homo sapiens
  source 1..23: mol_type = genomic DNA
agacccagagagccccgcccggg

SEQ ID NO: 2932 - DNA, 23 bp, Homo sapiens
  source 1..23: mol_type = genomic DNA
agacccctgatcagtattccagg

SEQ ID NO: 2933 - DNA, 23 bp, Homo sapiens
  source 1..23: mol_type = genomic DNA
agaccctgagaaccccgcccggg

SEQ ID NO: 2934 - DNA, 23 bp, Homo sapiens
  source 1..23: mol_type = genomic DNA
agaccctgagagccacgcctggg

SEQ ID NO: 2935 - DNA, 23 bp, Homo sapiens
  source 1..23: mol_type = genomic DNA
agaccctgagagccccgcccggg

SEQ ID NO: 2936 - DNA, 23 bp, Homo sapiens
  source 1..23: mol_type = genomic DNA
agaccctgagagccccgtccggg

SEQ ID NO: 2937 - DNA, 23 bp, Homo sapiens
  source 1..23: mol_type = genomic DNA
agaccctggcccaggccccgcgg

SEQ ID NO: 2938 - DNA, 23 bp, Homo sapiens
  source 1..23: mol_type = genomic DNA
agaccctggccccgcccccgcgg

SEQ ID NO: 2939 - DNA, 23 bp, Homo sapiens
  source 1..23: mol_type = genomic DNA
agaccctggccccgcccccgtgg

SEQ ID NO: 2940 - DNA, 23 bp, Homo sapiens
  source 1..23: mol_type = genomic DNA
agaccctggccccggccccgcgg

SEQ ID NO: 2941 - DNA, 23 bp, Homo sapiens
  source 1..23: mol_type = genomic DNA
agacctacaggcgatcaggtagg

SEQ ID NO: 2942 - DNA, 23 bp, Homo sapiens
  source 1..23: mol_type = genomic DNA
agacctggaccggtgagtgcggg

SEQ ID NO: 2943 - DNA, 23 bp, Homo sapiens
  source 1..23: mol_type = genomic DNA
agacctgggcaggtgagtgcggg

SEQ ID NO: 2944 - DNA, 23 bp, Homo sapiens
  source 1..23: mol_type = genomic DNA
agacctgggccggtgagtgcggg

SEQ ID NO: 2945 - DNA, 23 bp, Homo sapiens
  source 1..23: mol_type = genomic DNA
agacctgggcctgtgagtgcggg

SEQ ID NO: 2946 - DNA, 23 bp, Homo sapiens
  source 1..23: mol_type = genomic DNA
agacctgggcgggtgagtgcggg

SEQ ID NO: 2947 - DNA, 23 bp, Homo sapiens
  source 1..23: mol_type = genomic DNA
agacctgggctggtgagtgcggg

SEQ ID NO: 2948 - DNA, 23 bp, Homo sapiens
  source 1..23: mol_type = genomic DNA
agacgccaagatgctggtcatgg

SEQ ID NO: 2949 - DNA, 23 bp, Homo sapiens
  source 1..23: mol_type = genomic DNA
agacgccgagatgcgggtcacgg

SEQ ID NO: 2950 - DNA, 23 bp, Homo sapiens
  source 1..23: mol_type = genomic DNA
agacgccgagatgcgggtcatgg

SEQ ID NO: 2951 - DNA, 23 bp, Homo sapiens
  source 1..23: mol_type = genomic DNA
agacgccgagatgctggtcatgg

SEQ ID NO: 2952 - DNA, 23 bp, Homo sapiens
  source 1..23: mol_type = genomic DNA
agacggctctgggaaaagagggg

SEQ ID NO: 2953 - DNA, 23 bp, Homo sapiens
  source 1..23: mol_type = genomic DNA
agacggctctgggaaaggaaggg

SEQ ID NO: 2954 - DNA, 23 bp, Homo sapiens
  source 1..23: mol_type = genomic DNA
agacggctctgggaaaggagggg

SEQ ID NO: 2955 - DNA, 23 bp, Homo sapiens
  source 1..23: mol_type = genomic DNA
agactaaccgagcgaacctgggg

SEQ ID NO: 2956 - DNA, 23 bp, Homo sapiens
  source 1..23: mol_type = genomic DNA
agactcaccgagtggacctgggg

SEQ ID NO: 2957 - DNA, 23 bp, Homo sapiens
  source 1..23: mol_type = genomic DNA
agactctgagagccacgcctggg

SEQ ID NO: 2958 - DNA, 23 bp, Homo sapiens
  source 1..23: mol_type = genomic DNA
agactgaccgagagaacctgcgg

SEQ ID NO: 2959 - DNA, 23 bp, Homo sapiens
  source 1..23: mol_type = genomic DNA
agactgaccgagagaacctgggg

SEQ ID NO: 2960 - DNA, 23 bp, Homo sapiens
  source 1..23: mol_type = genomic DNA
agactgaccgagagagcctgcgg

SEQ ID NO: 2961 - DNA, 23 bp, Homo sapiens
  source 1..23: mol_type = genomic DNA
agactgaccgagaggacctgcgg

SEQ ID NO: 2962 - DNA, 23 bp, Homo sapiens
  source 1..23: mol_type = genomic DNA
agactgaccgagcgaacctgggg

SEQ ID NO: 2963 - DNA, 23 bp, Homo sapiens
  source 1..23: mol_type = genomic DNA
agactgaccgagtgaacctgcgg

SEQ ID NO: 2964 - DNA, 23 bp, Homo sapiens
  source 1..23: mol_type = genomic DNA
agactgaccgagtgagcctgcgg

SEQ ID NO: 2965 - DNA, 23 bp, Homo sapiens
  source 1..23: mol_type = genomic DNA
agactgaccgagtggacctgggg

SEQ ID NO: 2966 - DNA, 23 bp, Homo sapiens
  source 1..23: mol_type = genomic DNA
agacttaccgagagaacctgcgg

SEQ ID NO: 2967 - DNA, 23 bp, Homo sapiens
  source 1..23: mol_type = genomic DNA
agacttaccgagagagcctgcgg

SEQ ID NO: 2968 - DNA, 23 bp, Homo sapiens
  source 1..23: mol_type = genomic DNA
agacttaccgagaggacctgcgg

SEQ ID NO: 2969 - DNA, 23 bp, Homo sapiens
  source 1..23: mol_type = genomic DNA
agagaaagcagaagtccttctgg

SEQ ID NO: 2970 - DNA, 23 bp, Homo sapiens
  source 1..23: mol_type = genomic DNA
agagaacccagacgccagcctgg

SEQ ID NO: 2971 - DNA, 23 bp, Homo sapiens
  source 1..23: mol_type = genomic DNA
agagaagagggggccctcagagg

SEQ ID NO: 2972 - DNA, 23 bp, Homo sapiens
  source 1..23: mol_type = genomic DNA
agagagccccgcccgggacctgg

SEQ ID NO: 2973 - DNA, 23 bp, Homo sapiens
  source 1..23: mol_type = genomic DNA
agagagcctacctggagggccgg

SEQ ID NO: 2974 - DNA, 23 bp, Homo sapiens
  source 1..23: mol_type = genomic DNA
agagaggggaccgcaggcggggg

SEQ ID NO: 2975 - DNA, 23 bp, Homo sapiens
  source 1..23: mol_type = genomic DNA
agagcagacggggccctcagagg

SEQ ID NO: 2976 - DNA, 23 bp, Homo sapiens
  source 1..23: mol_type = genomic DNA
agagcagagggggccctcagagg

SEQ ID NO: 2977 - DNA, 23 bp, Homo sapiens
  source 1..23: mol_type = genomic DNA
agagcagcaggaggacggttcgg

SEQ ID NO: 2978 - DNA, 23 bp, Homo sapiens
  source 1..23: mol_type = genomic DNA
agagcagcaggaggagggctcgg

SEQ ID NO: 2979 - DNA, 23 bp, Homo sapiens
  source 1..23: mol_type = genomic DNA
agagcagcaggaggagggcttgg

SEQ ID NO: 2980 - DNA, 23 bp, Homo sapiens
  source 1..23: mol_type = genomic DNA
agagcagcaggaggagggttcgg

SEQ ID NO: 2981 - DNA, 23 bp, Homo sapiens
  source 1..23: mol_type = genomic DNA
agagcagcaggatgagggttcgg

SEQ ID NO: 2982 - DNA, 23 bp, Homo sapiens
  source 1..23: mol_type = genomic DNA
agagccacgcctggggccctggg

SEQ ID NO: 2983 - DNA, 23 bp, Homo sapiens
  source 1..23: mol_type = genomic DNA
agagccccacttcatcgcagtgg

SEQ ID NO: 2984 - DNA, 23 bp, Homo sapiens
  source 1..23: mol_type = genomic DNA
agagccccgcttcatcgcagtgg

SEQ ID NO: 2985 - DNA, 23 bp, Homo sapiens
  source 1..23: mol_type = genomic DNA
agagccccgcttcatctcagtgg

SEQ ID NO: 2986 - DNA, 23 bp, Homo sapiens
  source 1..23: mol_type = genomic DNA
agagcccctcaccctgagatggg

SEQ ID NO: 2987 - DNA, 23 bp, Homo sapiens
  source 1..23: mol_type = genomic DNA
agagcccctcaccctgagctggg

SEQ ID NO: 2988 - DNA, 23 bp, Homo sapiens
  source 1..23: mol_type = genomic DNA
agagccctgggcactgtcgctgg

SEQ ID NO: 2989 - DNA, 23 bp, Homo sapiens
  source 1..23: mol_type = genomic DNA
agagccctgggcactgttgctgg

SEQ ID NO: 2990 - DNA, 23 bp, Homo sapiens
  source 1..23: mol_type = genomic DNA
agagcgcaggtcctcgttcaagg

SEQ ID NO: 2991 - DNA, 23 bp, Homo sapiens
  source 1..23: mol_type = genomic DNA
agagcgcaggtcctcgttcaggg

SEQ ID NO: 2992 - DNA, 23 bp, Homo sapiens
  source 1..23: mol_type = genomic DNA
agagcgcaggtcctctttcaggg

SEQ ID NO: 2993 - DNA, 23 bp, Homo sapiens
  source 1..23: mol_type = genomic DNA
agagctcaggtggggtgaagggg

SEQ ID NO: 2994 - DNA, 23 bp, Homo sapiens
  source 1..23: mol_type = genomic DNA
agaggaacgaggtgcccgcccgg

SEQ ID NO: 2995 - DNA, 23 bp, Homo sapiens
  source 1..23: mol_type = genomic DNA
agaggagcgaggggcccgcccgg

SEQ ID NO: 2996 - DNA, 23 bp, Homo sapiens
  source 1..23: mol_type = genomic DNA
agaggagcgaggggccctcccgg

SEQ ID NO: 2997 - DNA, 23 bp, Homo sapiens
  source 1..23: mol_type = genomic DNA
agaggccgagatgcgggtcatgg

SEQ ID NO: 2998 - DNA, 23 bp, Homo sapiens
  source 1..23: mol_type = genomic DNA
agaggctcttgaagtcacaaagg

SEQ ID NO: 2999 - DNA, 23 bp, Homo sapiens
  source 1..23: mol_type = genomic DNA
agagggagcacaggtcagcgtgg

SEQ ID NO: 3000 - DNA, 23 bp, Homo sapiens
  source 1..23: mol_type = genomic DNA
agagggtcatggtggacatcggg

SEQ ID NO: 3001 - DNA, 23 bp, Homo sapiens
  source 1..23: mol_type = genomic DNA
agagggtcatggtggacatgggg

SEQ ID NO: 3002 - DNA, 23 bp, Homo sapiens
  source 1..23: mol_type = genomic DNA
agaggtcgtgacctgcgccccgg

SEQ ID NO: 3003 - DNA, 23 bp, Homo sapiens
  source 1..23: mol_type = genomic DNA
agagtaagtgctagcacacaggg

SEQ ID NO: 3004 - DNA, 23 bp, Homo sapiens
  source 1..23: mol_type = genomic DNA
agagtaagtgctggcacacaggg

SEQ ID NO: 3005 - DNA, 23 bp, Homo sapiens
  source 1..23: mol_type = genomic DNA
agagtaagttctggcacacaggg

SEQ ID NO: 3006 - DNA, 23 bp, Homo sapiens
  source 1..23: mol_type = genomic DNA
agagtagcaggacgagggttcgg

SEQ ID NO: 3007 - DNA, 23 bp, Homo sapiens
  source 1..23: mol_type = genomic DNA
agagtagcaggaggagggttcgg

SEQ ID NO: 3008 - DNA, 23 bp, Homo sapiens
  source 1..23: mol_type = genomic DNA
agagtctcaggccccgaaggcgg

SEQ ID NO: 3009 - DNA, 23 bp, Homo sapiens
  source 1..23: mol_type = genomic DNA
agagtgggcgggggggggtgggg

SEQ ID NO: 3010 - DNA, 23 bp, Homo sapiens
  source 1..23: mol_type = genomic DNA
agagtgggcggggggggtggtgg

SEQ ID NO: 3011 - DNA, 23 bp, Homo sapiens
  source 1..23: mol_type = genomic DNA
agatagaaccttccagaagtggg

SEQ ID NO: 3012 - DNA, 23 bp, Homo sapiens
  source 1..23: mol_type = genomic DNA
agatcacactgacctggcagcgg

SEQ ID NO: 3013 - DNA, 23 bp, Homo sapiens
  source 1..23: mol_type = genomic DNA
agatcacactgacctggcagtgg

SEQ ID NO: 3014 - DNA, 23 bp, Homo sapiens
  source 1..23: mol_type = genomic DNA
agatccgcccccgaggccgcggg

SEQ ID NO: 3015 - DNA, 23 bp, Homo sapiens
  source 1..23: mol_type = genomic DNA
agatctacaggagatagggaagg

SEQ ID NO: 3016 - DNA, 23 bp, Homo sapiens
  source 1..23: mol_type = genomic DNA
agatctacaggagatggggaagg

SEQ ID NO: 3017 - DNA, 23 bp, Homo sapiens
  source 1..23: mol_type = genomic DNA
agatctacaggcgatcaggaagg

SEQ ID NO: 3018 - DNA, 23 bp, Homo sapiens
  source 1..23: mol_type = genomic DNA
agatctacaggcgatcagggagg

SEQ ID NO: 3019 - DNA, 23 bp, Homo sapiens
  source 1..23: mol_type = genomic DNA
agatctacgggagatggggaagg

SEQ ID NO: 3020 - DNA, 23 bp, Homo sapiens
  source 1..23: mol_type = genomic DNA
agatctataggagatggggaagg

SEQ ID NO: 3021 - DNA, 23 bp, Homo sapiens
  source 1..23: mol_type = genomic DNA
agatctataggcgatcagggagg

SEQ ID NO: 3022 - DNA, 23 bp, Homo sapiens
  source 1..23: mol_type = genomic DNA
agatgaagcggggctccccgcgg

SEQ ID NO: 3023 - DNA, 23 bp, Homo sapiens
  source 1..23: mol_type = genomic DNA
agatgaagcggggctctccgcgg

SEQ ID NO: 3024 - DNA, 23 bp, Homo sapiens
  source 1..23: mol_type = genomic DNA
agatggaaccttccagaagtggg

SEQ ID NO: 3025 - DNA, 23 bp, Homo sapiens
  source 1..23: mol_type = genomic DNA
agatggagccgcgggcgccgtgg

SEQ ID NO: 3026 - DNA, 23 bp, Homo sapiens
  source 1..23: mol_type = genomic DNA
agatggccctgggaaaggagggg

SEQ ID NO: 3027 - DNA, 23 bp, Homo sapiens
  source 1..23: mol_type = genomic DNA
agatggctctgggaaaagagggg

SEQ ID NO: 3028 - DNA, 23 bp, Homo sapiens
  source 1..23: mol_type = genomic DNA
agatggctctgggaaaggagggg

SEQ ID NO: 3029 - DNA, 23 bp, Homo sapiens
  source 1..23: mol_type = genomic DNA
agatggggtaaggagggagacgg

SEQ ID NO: 3030 - DNA, 23 bp, Homo sapiens
  source 1..23: mol_type = genomic DNA
agatggggtaaggagggagatgg

SEQ ID NO: 3031 - DNA, 23 bp, Homo sapiens
  source 1..23: mol_type = genomic DNA
agattacatcgccctgaacgagg

SEQ ID NO: 3032 - DNA, 23 bp, Homo sapiens
  source 1..23: mol_type = genomic DNA
agattcttggggtctagagtggg

SEQ ID NO: 3033 - DNA, 23 bp, Homo sapiens
  source 1..23: mol_type = genomic DNA
agattgaccgagtggacctgggg

SEQ ID NO: 3034 - DNA, 23 bp, Homo sapiens
  source 1..23: mol_type = genomic DNA
agcaacgggcccgcctggcgggg

SEQ ID NO: 3035 - DNA, 23 bp, Homo sapiens
  source 1..23: mol_type = genomic DNA
agcaagaggggccggagtattgg

SEQ ID NO: 3036 - DNA, 23 bp, Homo sapiens
  source 1..23: mol_type = genomic DNA
agcaaggggaccgcaggcggggg

SEQ ID NO: 3037 - DNA, 23 bp, Homo sapiens
  source 1..23: mol_type = genomic DNA
agcaaggggcccgcccggcgggg

SEQ ID NO: 3038 - DNA, 23 bp, Homo sapiens
  source 1..23: mol_type = genomic DNA
agcaaggggcccgcctggcgggg

SEQ ID NO: 3039 - DNA, 23 bp, Homo sapiens
  source 1..23: mol_type = genomic DNA
agcaaggggccctcctggcgggg

SEQ ID NO: 3040 - DNA, 23 bp, Homo sapiens
  source 1..23: mol_type = genomic DNA
agcacacagggtcccaggctggg

SEQ ID NO: 3041 - DNA, 23 bp, Homo sapiens
  source 1..23: mol_type = genomic DNA
agcacctcagagtggcctcatgg

SEQ ID NO: 3042 - DNA, 23 bp, Homo sapiens
  source 1..23: mol_type = genomic DNA
agcacctcagggtgacctcatgg

SEQ ID NO: 3043 - DNA, 23 bp, Homo sapiens
  source 1..23: mol_type = genomic DNA
agcacctcagggtggcctcatgg

SEQ ID NO: 3044 - DNA, 23 bp, Homo sapiens
  source 1..23: mol_type = genomic DNA
agcacctcagggtggcttcatgg

SEQ ID NO: 3045 - DNA, 23 bp, Homo sapiens
  source 1..23: mol_type = genomic DNA
agcagagaacaaggcctgagagg

SEQ ID NO: 3046 - DNA, 23 bp, Homo sapiens
  source 1..23: mol_type = genomic DNA
agcagcaggaggacggttcgggg

SEQ ID NO: 3047 - DNA, 23 bp, Homo sapiens
  source 1..23: mol_type = genomic DNA
agcagcaggaggagggctcgggg

SEQ ID NO: 3048 - DNA, 23 bp, Homo sapiens
  source 1..23: mol_type = genomic DNA
agcagcaggaggagggcttgggg

SEQ ID NO: 3049 - DNA, 23 bp, Homo sapiens
  source 1..23: mol_type = genomic DNA
agcagcaggaggagggttcgggg

SEQ ID NO: 3050 - DNA, 23 bp, Homo sapiens
  source 1..23: mol_type = genomic DNA
agcagcaggatgagggttcgggg

SEQ ID NO: 3051 - DNA, 23 bp, Homo sapiens
  source 1..23: mol_type = genomic DNA
agcaggagaggcctgagtattgg

SEQ ID NO: 3052 - DNA, 23 bp, Homo sapiens
  source 1..23: mol_type = genomic DNA
agcaggaggagccggagtattgg

SEQ ID NO: 3053 - DNA, 23 bp, Homo sapiens
  source 1..23: mol_type = genomic DNA
agcaggaggagggttcggggcgg

SEQ ID NO: 3054 - DNA, 23 bp, Homo sapiens
  source 1..23: mol_type = genomic DNA
agcaggaggggccggaatattgg

SEQ ID NO: 3055 - DNA, 23 bp, Homo sapiens
  source 1..23: mol_type = genomic DNA
agcaggaggggccggagtattgg

SEQ ID NO: 3056 - DNA, 23 bp, Homo sapiens
  source 1..23: mol_type = genomic DNA
agcaggagggtccggagtattgg

SEQ ID NO: 3057 - DNA, 23 bp, Homo sapiens
  source 1..23: mol_type = genomic DNA
agcatctcagagtggcctcatgg

SEQ ID NO: 3058 - DNA, 23 bp, Homo sapiens
  source 1..23: mol_type = genomic DNA
agcatgcgatgggctgtttaagg

SEQ ID NO: 3059 - DNA, 23 bp, Homo sapiens
  source 1..23: mol_type = genomic DNA
agcatgtacggctgcgacgtggg

SEQ ID NO: 3060 - DNA, 23 bp, Homo sapiens
  source 1..23: mol_type = genomic DNA
agcattcatgagtcaggggaagg

SEQ ID NO: 3061 - DNA, 23 bp, Homo sapiens
  source 1..23: mol_type = genomic DNA
agcattcgtgagtcaggggaagg

SEQ ID NO: 3062 - DNA, 23 bp, Homo sapiens
  source 1..23: mol_type = genomic DNA
agccattttgcatctgtcatggg

SEQ ID NO: 3063 - DNA, 23 bp, Homo sapiens
  source 1..23: mol_type = genomic DNA
agcccagggcccagcacctcagg

SEQ ID NO: 3064 - DNA, 23 bp, Homo sapiens
  source 1..23: mol_type = genomic DNA
agccctcctcctgctgctctcgg

SEQ ID NO: 3065 - DNA, 23 bp, Homo sapiens
  source 1..23: mol_type = genomic DNA
agccgcgcagggaggagggtcgg

SEQ ID NO: 3066 - DNA, 23 bp, Homo sapiens
  source 1..23: mol_type = genomic DNA
agccgcgcagggaggtgggtcgg

SEQ ID NO: 3067 - DNA, 23 bp, Homo sapiens
  source 1..23: mol_type = genomic DNA
agccgcgccgggacgagggtcgg

SEQ ID NO: 3068 - DNA, 23 bp, Homo sapiens
  source 1..23: mol_type = genomic DNA
agccgcgccgggaggagggtcgg

SEQ ID NO: 3069 - DNA, 23 bp, Homo sapiens
  source 1..23: mol_type = genomic DNA
agccgcgcctggaggagggtcgg

SEQ ID NO: 3070 - DNA, 23 bp, Homo sapiens
  source 1..23: mol_type = genomic DNA
agccgtgggtggagcaggagggg

SEQ ID NO: 3071 - DNA, 23 bp, Homo sapiens
  source 1..23: mol_type = genomic DNA
agcctctctgacctttagcaggg

SEQ ID NO: 3072 - DNA, 23 bp, Homo sapiens
  source 1..23: mol_type = genomic DNA
agcgacgccgcgagtccaagagg

SEQ ID NO: 3073 - DNA, 23 bp, Homo sapiens
  source 1..23: mol_type = genomic DNA
agcgacgccgcgagtccgagagg

SEQ ID NO: 3074 - DNA, 23 bp, Homo sapiens
  source 1..23: mol_type = genomic DNA
agcgaggggaccgcaggcggggg

SEQ ID NO: 3075 - DNA, 23 bp, Homo sapiens
  source 1..23: mol_type = genomic DNA
agcgaggggcccgcccggcgagg

SEQ ID NO: 3076 - DNA, 23 bp, Homo sapiens
  source 1..23: mol_type = genomic DNA
agcgaggggccctcccggcgagg

SEQ ID NO: 3077 - DNA, 23 bp, Homo sapiens
  source 1..23: mol_type = genomic DNA
agcgcccgtccgaccccacgtgg

SEQ ID NO: 3078 - DNA, 23 bp, Homo sapiens
  source 1..23: mol_type = genomic DNA
agcggtgtagaaatacctcatgg

SEQ ID NO: 3079 - DNA, 23 bp, Homo sapiens
  source 1..23: mol_type = genomic DNA
agctatgttcgctggagctgtgg

SEQ ID NO: 3080 - DNA, 23 bp, Homo sapiens
  source 1..23: mol_type = genomic DNA
agctcagggcccagcacctcagg

SEQ ID NO: 3081 - DNA, 23 bp, Homo sapiens
  source 1..23: mol_type = genomic DNA
agctctgggaaaagaggggaagg

SEQ ID NO: 3082 - DNA, 23 bp, Homo sapiens
  source 1..23: mol_type = genomic DNA
agctgaagtggtcgggggtgggg

SEQ ID NO: 3083 - DNA, 23 bp, Homo sapiens
  source 1..23: mol_type = genomic DNA
agctgaagtggtctggggtgggg

SEQ ID NO: 3084 - DNA, 23 bp, Homo sapiens
  source 1..23: mol_type = genomic DNA
agctgccgcagtggtcaaagtgg

SEQ ID NO: 3085 - DNA, 23 bp, Homo sapiens
  source 1..23: mol_type = genomic DNA
agctgctgcagtggtcaaagtgg

SEQ ID NO: 3086 - DNA, 23 bp, Homo sapiens
  source 1..23: mol_type = genomic DNA
agctggagcgcgctggtaccagg

SEQ ID NO: 3087 - DNA, 23 bp, Homo sapiens
  source 1..23: mol_type = genomic DNA
agctggggtaaggaggggaatgg

SEQ ID NO: 3088 - DNA, 23 bp, Homo sapiens
  source 1..23: mol_type = genomic DNA
agctgtcctaggagctatggtgg

SEQ ID NO: 3089 - DNA, 23 bp, Homo sapiens
  source 1..23: mol_type = genomic DNA
agctgtcctaggagctgtgatgg

SEQ ID NO: 3090 - DNA, 23 bp, Homo sapiens
  source 1..23: mol_type = genomic DNA
agctgtcctaggagctgtggtgg

SEQ ID NO: 3091 - DNA, 23 bp, Homo sapiens
  source 1..23: mol_type = genomic DNA
agctgtgatcactggagctgtgg

SEQ ID NO: 3092 - DNA, 23 bp, Homo sapiens
  source 1..23: mol_type = genomic DNA
agctgtgatcgctggagctgtgg

SEQ ID NO: 3093 - DNA, 23 bp, Homo sapiens
  source 1..23: mol_type = genomic DNA
agctgtgttcgctggagctgtgg

SEQ ID NO: 3094 - DNA, 23 bp, Homo sapiens
  source 1..23: mol_type = genomic DNA
agcttgtaaaggtgagagcctgg

SEQ ID NO: 3095 - DNA, 23 bp, Homo sapiens
  source 1..23: mol_type = genomic DNA
agcttgtaaaggtgagagcttgg

SEQ ID NO: 3096 - DNA, 23 bp, Homo sapiens
  source 1..23: mol_type = genomic DNA
aggaaaagtcacggttcccaagg

SEQ ID NO: 3097 - DNA, 23 bp, Homo sapiens
  source 1..23: mol_type = genomic DNA
aggaaaagtcatggttcccaagg

SEQ ID NO: 3098 - DNA, 23 bp, Homo sapiens
  source 1..23: mol_type = genomic DNA
aggaaagcaagtgtgggtcctgg

SEQ ID NO: 3099 - DNA, 23 bp, Homo sapiens
  source 1..23: mol_type = genomic DNA
aggaacagctcaggtggagaagg

SEQ ID NO: 3100 - DNA, 23 bp, Homo sapiens
  source 1..23: mol_type = genomic DNA
aggaagagctcaggtagggaagg

SEQ ID NO: 3101 - DNA, 23 bp, Homo sapiens
  source 1..23: mol_type = genomic DNA
aggaagagctcaggtggagaagg

SEQ ID NO: 3102 - DNA, 23 bp, Homo sapiens
  source 1..23: mol_type = genomic DNA
aggaagagctcaggtggggaagg

SEQ ID NO: 3103 - DNA, 23 bp, Homo sapiens
  source 1..23: mol_type = genomic DNA
aggaagagttcaggtagggaagg

SEQ ID NO: 3104 - DNA, 23 bp, Homo sapiens
  source 1..23: mol_type = genomic DNA
aggacacctgggatggggaaggg

SEQ ID NO: 3105 - DNA, 23 bp, Homo sapiens
  source 1..23: mol_type = genomic DNA
aggacacctggggtagggaaggg

SEQ ID NO: 3106 - DNA, 23 bp, Homo sapiens
  source 1..23: mol_type = genomic DNA
aggacacctggggtggggaaggg

SEQ ID NO: 3107 - DNA, 23 bp, Homo sapiens
  source 1..23: mol_type = genomic DNA
aggacacctggtgtggggaaggg

SEQ ID NO: 3108 - DNA, 23 bp, Homo sapiens
  source 1..23: mol_type = genomic DNA
aggacccgggaagccgcgccggg

SEQ ID NO: 3109 - DNA, 23 bp, Homo sapiens
  source 1..23: mol_type = genomic DNA
aggacccgggaagccgcgcctgg

SEQ ID NO: 3110 - DNA, 23 bp, Homo sapiens
  source 1..23: mol_type = genomic DNA
aggacccggggagccgcgcaggg

SEQ ID NO: 3111 - DNA, 23 bp, Homo sapiens
  source 1..23: mol_type = genomic DNA
aggacccggggagccgcgccggg

SEQ ID NO: 3112 - DNA, 23 bp, Homo sapiens
  source 1..23: mol_type = genomic DNA
aggacccggggagcggcgcaggg

SEQ ID NO: 3113 - DNA, 23 bp, Homo sapiens
  source 1..23: mol_type = genomic DNA
aggacccgggtagccgcgccggg

SEQ ID NO: 3114 - DNA, 23 bp, Homo sapiens
  source 1..23: mol_type = genomic DNA
aggaccgggggagccgcgccggg

SEQ ID NO: 3115 - DNA, 23 bp, Homo sapiens
  source 1..23: mol_type = genomic DNA
aggacctgaggagccgcgccggg

SEQ ID NO: 3116 - DNA, 23 bp, Homo sapiens
  source 1..23: mol_type = genomic DNA
aggacctggtcagagcccacagg

SEQ ID NO: 3117 - DNA, 23 bp, Homo sapiens
  source 1..23: mol_type = genomic DNA
aggacctggtcagagcccgcagg

SEQ ID NO: 3118 - DNA, 23 bp, Homo sapiens
  source 1..23: mol_type = genomic DNA
aggacctggtcagagccctcagg

SEQ ID NO: 3119 - DNA, 23 bp, Homo sapiens
  source 1..23: mol_type = genomic DNA
aggaccttcaggagggcggttgg

SEQ ID NO: 3120 - DNA, 23 bp, Homo sapiens
  source 1..23: mol_type = genomic DNA
aggacgaagtcccaggccccggg

SEQ ID NO: 3121 - DNA, 23 bp, Homo sapiens
  source 1..23: mol_type = genomic DNA
aggacgaagtcccaggtcccggg

SEQ ID NO: 3122 - DNA, 23 bp, Homo sapiens
  source 1..23: mol_type = genomic DNA
aggagactctgagtccgggtggg

SEQ ID NO: 3123 - DNA, 23 bp, Homo sapiens
  source 1..23: mol_type = genomic DNA
aggagagaggggaccgcaggcgg

SEQ ID NO: 3124 - DNA, 23 bp, Homo sapiens
  source 1..23: mol_type = genomic DNA
aggagattctgagtccgggtggg

SEQ ID NO: 3125 - DNA, 23 bp, Homo sapiens
  source 1..23: mol_type = genomic DNA
aggagattttgagtccgggtggg

SEQ ID NO: 3126 - DNA, 23 bp, Homo sapiens
  source 1..23: mol_type = genomic DNA
aggagcaaggggaccgcaggcgg

SEQ ID NO: 3127 - DNA, 23 bp, Homo sapiens
  source 1..23: mol_type = genomic DNA
aggagccctgcaccctgagatgg

SEQ ID NO: 3128 - DNA, 23 bp, Homo sapiens
  source 1..23: mol_type = genomic DNA
aggagcccttcagcagggtcagg

SEQ ID NO: 3129 - DNA, 23 bp, Homo sapiens
  source 1..23: mol_type = genomic DNA
aggagcgaggggaccgcaggcgg

SEQ ID NO: 3130 - DNA, 23 bp, Homo sapiens
  source 1..23: mol_type = genomic DNA
aggagcgcagatcctcgttcagg

SEQ ID NO: 3131 - DNA, 23 bp, Homo sapiens
  source 1..23: mol_type = genomic DNA
aggagcgcaggtcctcattcagg

SEQ ID NO: 3132 - DNA, 23 bp, Homo sapiens
  source 1..23: mol_type = genomic DNA
aggagcgcaggtcctcgttcagg

SEQ ID NO: 3133 - DNA, 23 bp, Homo sapiens
  source 1..23: mol_type = genomic DNA
aggagcgcaggtcctcgttctgg

SEQ ID NO: 3134 - DNA, 23 bp, Homo sapiens
  source 1..23: mol_type = genomic DNA
aggagctcaggtcctcgttcagg

SEQ ID NO: 3135 - DNA, 23 bp, Homo sapiens
  source 1..23: mol_type = genomic DNA
aggaggaattgtgaggtgggtgg

SEQ ID NO: 3136 - DNA, 23 bp, Homo sapiens
  source 1..23: mol_type = genomic DNA
aggatgatccaagaaatcactgg

SEQ ID NO: 3137 - DNA, 23 bp, Homo sapiens
  source 1..23: mol_type = genomic DNA
aggatgtacggctgcgacctggg

SEQ ID NO: 3138 - DNA, 23 bp, Homo sapiens
  source 1..23: mol_type = genomic DNA
aggatgtacggctgcgacgtggg

SEQ ID NO: 3139 - DNA, 23 bp, Homo sapiens
  source 1..23: mol_type = genomic DNA
aggatgtatggctgcgacctggg

SEQ ID NO: 3140 - DNA, 23 bp, Homo sapiens
  source 1..23: mol_type = genomic DNA
aggatgtatggctgcgacgtggg

SEQ ID NO: 3141 - DNA, 23 bp, Homo sapiens
  source 1..23: mol_type = genomic DNA
aggatgtctggctgcgacctggg

SEQ ID NO: 3142 - DNA, 23 bp, Homo sapiens
  source 1..23: mol_type = genomic DNA
aggatgtctggctgcgacgtggg

SEQ ID NO: 3143 - DNA, 23 bp, Homo sapiens
  source 1..23: mol_type = genomic DNA
aggatgtgtggctgcgacgtggg

SEQ ID NO: 3144 - DNA, 23 bp, Homo sapiens
  source 1..23: mol_type = genomic DNA
aggatgtttggctgcgacctggg

SEQ ID NO: 3145 - DNA, 23 bp, Homo sapiens
  source 1..23: mol_type = genomic DNA
aggatgtttggctgcgacgtggg

SEQ ID NO: 3146 - DNA, 23 bp, Homo sapiens
  source 1..23: mol_type = genomic DNA
aggcaggatcaggaaacacgagg

SEQ ID NO: 3147 - DNA, 23 bp, Homo sapiens
  source 1..23: mol_type = genomic DNA
aggcagggaacacttctacctgg

SEQ ID NO: 3148 - DNA, 23 bp, Homo sapiens
  source 1..23: mol_type = genomic DNA
aggcagggcacacttctacctgg

SEQ ID NO: 3149 - DNA, 23 bp, Homo sapiens
  source 1..23: mol_type = genomic DNA
aggcagggccatgcaatcttagg

SEQ ID NO: 3150 - DNA, 23 bp, Homo sapiens
  source 1..23: mol_type = genomic DNA
aggcagggccatgcgatcttagg

SEQ ID NO: 3151 - DNA, 23 bp, Homo sapiens
  source 1..23: mol_type = genomic DNA
aggcagggccatgtgatcttagg

SEQ ID NO: 3152 - DNA, 23 bp, Homo sapiens
  source 1..23: mol_type = genomic DNA
aggcataatgtgaggaggtgggg

SEQ ID NO: 3153 - DNA, 23 bp, Homo sapiens
  source 1..23: mol_type = genomic DNA
aggcattttgcatctgtaatggg

SEQ ID NO: 3154 - DNA, 23 bp, Homo sapiens
  source 1..23: mol_type = genomic DNA
aggcattttgcatctgtcatggg

SEQ ID NO: 3155 - DNA, 23 bp, Homo sapiens
  source 1..23: mol_type = genomic DNA
aggccaaaaatccccccgggtgg

SEQ ID NO: 3156 - DNA, 23 bp, Homo sapiens
  source 1..23: mol_type = genomic DNA
aggccaaaatccccgcgggttgg

SEQ ID NO: 3157 - DNA, 23 bp, Homo sapiens
  source 1..23: mol_type = genomic DNA
aggccatcccgggagatctacgg

SEQ ID NO: 3158 - DNA, 23 bp, Homo sapiens
  source 1..23: mol_type = genomic DNA
aggccatgccgggagatctacgg

SEQ ID NO: 3159 - DNA, 23 bp, Homo sapiens
  source 1..23: mol_type = genomic DNA
aggccccgggcggggctctcagg

SEQ ID NO: 3160 - DNA, 23 bp, Homo sapiens
  source 1..23: mol_type = genomic DNA
aggcctgagaagaaaagtcatgg

SEQ ID NO: 3161 - DNA, 23 bp, Homo sapiens
  source 1..23: mol_type = genomic DNA
aggcctgagaggaaaagtcacgg

SEQ ID NO: 3162 - DNA, 23 bp, Homo sapiens
  source 1..23: mol_type = genomic DNA
aggcctgagaggaaaagtcatgg

SEQ ID NO: 3163 - DNA, 23 bp, Homo sapiens
  source 1..23: mol_type = genomic DNA
aggcgaactggtcatacccgcgg

SEQ ID NO: 3164 - DNA, 23 bp, Homo sapiens
  source 1..23: mol_type = genomic DNA
aggcgaactggtcatgcccgcgg

SEQ ID NO: 3165 - DNA, 23 bp, Homo sapiens
  source 1..23: mol_type = genomic DNA
aggcgaactggttatacccgcgg

SEQ ID NO: 3166 - DNA, 23 bp, Homo sapiens
  source 1..23: mol_type = genomic DNA
aggcgaactggttatgcccgcgg

SEQ ID NO: 3167 - DNA, 23 bp, Homo sapiens
  source 1..23: mol_type = genomic DNA
aggcgacccgggccgtccgtggg

SEQ ID NO: 3168 - DNA, 23 bp, Homo sapiens
  source 1..23: mol_type = genomic DNA
aggcgcctgggcctctcccgggg

SEQ ID NO: 3169 - DNA, 23 bp, Homo sapiens
  source 1..23: mol_type = genomic DNA
aggcgctttgcatctctcatagg

SEQ ID NO: 3170 - DNA, 23 bp, Homo sapiens
  source 1..23: mol_type = genomic DNA
aggcgctttgcatctctcatggg

SEQ ID NO: 3171 - DNA, 23 bp, Homo sapiens
  source 1..23: mol_type = genomic DNA
aggcgctttgcatctttcatggg

SEQ ID NO: 3172 - DNA, 23 bp, Homo sapiens
  source 1..23: mol_type = genomic DNA
aggcggactggtcatacccgcgg

SEQ ID NO: 3173 - DNA, 23 bp, Homo sapiens
  source 1..23: mol_type = genomic DNA
aggcggactggtcatgcccgcgg

SEQ ID NO: 3174 - DNA, 23 bp, Homo sapiens
  source 1..23: mol_type = genomic DNA
aggcggggcacacttctacctgg

SEQ ID NO: 3175 - DNA, 23 bp, Homo sapiens
  source 1..23: mol_type = genomic DNA
aggcgggggcgcaggacccgggg

SEQ ID NO: 3176 - DNA, 23 bp, Homo sapiens
  source 1..23: mol_type = genomic DNA
aggcgggggcgcaggacctgagg

SEQ ID NO: 3177 - DNA, 23 bp, Homo sapiens
  source 1..23: mol_type = genomic DNA
aggcgggggctcaggacccgggg

SEQ ID NO: 3178 - DNA, 23 bp, Homo sapiens
  source 1..23: mol_type = genomic DNA
aggcgtactggtcatacccgcgg

SEQ ID NO: 3179 - DNA, 23 bp, Homo sapiens
  source 1..23: mol_type = genomic DNA
aggcgtactggtcatgcccgcgg

SEQ ID NO: 3180 - DNA, 23 bp, Homo sapiens
  source 1..23: mol_type = genomic DNA
aggcgtactggtggtacccgcgg

SEQ ID NO: 3181 - DNA, 23 bp, Homo sapiens
  source 1..23: mol_type = genomic DNA
aggcgtcctgccggtacccgcgg

SEQ ID NO: 3182 - DNA, 23 bp, Homo sapiens
  source 1..23: mol_type = genomic DNA
aggcgtcctgctggtacccgcgg

SEQ ID NO: 3183 - DNA, 23 bp, Homo sapiens
  source 1..23: mol_type = genomic DNA
aggcgtcctggtcatacccgcgg

SEQ ID NO: 3184 - DNA, 23 bp, Homo sapiens
  source 1..23: mol_type = genomic DNA
aggcgtcctggtggtacccgcgg

SEQ ID NO: 3185 - DNA, 23 bp, Homo sapiens
  source 1..23: mol_type = genomic DNA
aggcgtgctgttcatacccgcgg

SEQ ID NO: 3186 - DNA, 23 bp, Homo sapiens
  source 1..23: mol_type = genomic DNA
aggctaactggtcatgcccgcgg

SEQ ID NO: 3187 - DNA, 23 bp, Homo sapiens
  source 1..23: mol_type = genomic DNA
aggctaactggttatacccgcgg

SEQ ID NO: 3188 - DNA, 23 bp, Homo sapiens
  source 1..23: mol_type = genomic DNA
aggctaactggttatgcccgcgg

SEQ ID NO: 3189 - DNA, 23 bp, Homo sapiens
  source 1..23: mol_type = genomic DNA
aggctcttgaagtcacaaagggg

SEQ ID NO: 3190 - DNA, 23 bp, Homo sapiens
  source 1..23: mol_type = genomic DNA
aggctgaccgagtgaacctgcgg

SEQ ID NO: 3191 - DNA, 23 bp, Homo sapiens
  source 1..23: mol_type = genomic DNA
aggctgaccgagtgagcctgcgg

SEQ ID NO: 3192 - DNA, 23 bp, Homo sapiens
  source 1..23: mol_type = genomic DNA
aggctgatgcctgaggtccttgg

SEQ ID NO: 3193 - DNA, 23 bp, Homo sapiens
  source 1..23: mol_type = genomic DNA
aggctgcattagcccctgtgtgg

SEQ ID NO: 3194 - DNA, 23 bp, Homo sapiens
  source 1..23: mol_type = genomic DNA
aggctgcgtgtaagtgatggcgg

SEQ ID NO: 3195 - DNA, 23 bp, Homo sapiens
  source 1..23: mol_type = genomic DNA
aggctgcgtgtaagtgatggggg

SEQ ID NO: 3196 - DNA, 23 bp, Homo sapiens
  source 1..23: mol_type = genomic DNA
aggctgcgtgtaagtggtggggg

SEQ ID NO: 3197 - DNA, 23 bp, Homo sapiens
  source 1..23: mol_type = genomic DNA
aggctgcgttagcccctgtgagg

SEQ ID NO: 3198 - DNA, 23 bp, Homo sapiens
  source 1..23: mol_type = genomic DNA
aggctgcgttagcccctgtgtgg

SEQ ID NO: 3199 - DNA, 23 bp, Homo sapiens
  source 1..23: mol_type = genomic DNA
aggctgctgacctttctctcagg

SEQ ID NO: 3200 - DNA, 23 bp, Homo sapiens
  source 1..23: mol_type = genomic DNA
aggctgctgcaggggtcaaaggg

SEQ ID NO: 3201 - DNA, 23 bp, Homo sapiens
  source 1..23: mol_type = genomic DNA
aggctgctgccggtgtcaaaggg

SEQ ID NO: 3202 - DNA, 23 bp, Homo sapiens
  source 1..23: mol_type = genomic DNA
aggctgggatggcccacgtgtgg

SEQ ID NO: 3203 - DNA, 23 bp, Homo sapiens
  source 1..23: mol_type = genomic DNA
aggctgggatggcccaggtgtgg

SEQ ID NO: 3204 - DNA, 23 bp, Homo sapiens
  source 1..23: mol_type = genomic DNA
aggctgggatggcccatgtgtgg

SEQ ID NO: 3205 - DNA, 23 bp, Homo sapiens
  source 1..23: mol_type = genomic DNA
aggctgtgttagcccctgtgtgg

SEQ ID NO: 3206 - DNA, 23 bp, Homo sapiens
  source 1..23: mol_type = genomic DNA
agggaaaaggcctaggtaatggg

SEQ ID NO: 3207 - DNA, 23 bp, Homo sapiens
  source 1..23: mol_type = genomic DNA
agggaaaaggcctgggtaatggg

SEQ ID NO: 3208 - DNA, 23 bp, Homo sapiens
  source 1..23: mol_type = genomic DNA
agggaaagcagaagtccttctgg

SEQ ID NO: 3209 - DNA, 23 bp, Homo sapiens
  source 1..23: mol_type = genomic DNA
agggaaagcaggagcccttctgg

SEQ ID NO: 3210 - DNA, 23 bp, Homo sapiens
  source 1..23: mol_type = genomic DNA
agggaaagcaggagcctctctgg

SEQ ID NO: 3211 - DNA, 23 bp, Homo sapiens
  source 1..23: mol_type = genomic DNA
agggaatagaagattatcccagg

SEQ ID NO: 3212 - DNA, 23 bp, Homo sapiens
  source 1..23: mol_type = genomic DNA
agggaggcggatctcggacccgg

SEQ ID NO: 3213 - DNA, 23 bp, Homo sapiens
  source 1..23: mol_type = genomic DNA
agggcaggatcaggaaacacagg

SEQ ID NO: 3214 - DNA, 23 bp, Homo sapiens
  source 1..23: mol_type = genomic DNA
agggcaggatcaggaaacacggg

SEQ ID NO: 3215 - DNA, 23 bp, Homo sapiens
  source 1..23: mol_type = genomic DNA
agggcaggatcaggaaacatggg

SEQ ID NO: 3216 - DNA, 23 bp, Homo sapiens
  source 1..23: mol_type = genomic DNA
agggcgcaggacccggggagcgg

SEQ ID NO: 3217 - DNA, 23 bp, Homo sapiens
  source 1..23: mol_type = genomic DNA
agggcggggcggggctcgggggg

SEQ ID NO: 3218 - DNA, 23 bp, Homo sapiens
  source 1..23: mol_type = genomic DNA
agggctgaggcttggaggtcagg

SEQ ID NO: 3219 - DNA, 23 bp, Homo sapiens
  source 1..23: mol_type = genomic DNA
agggctgaggcttgggggtcagg

SEQ ID NO: 3220 - DNA, 23 bp, Homo sapiens
  source 1..23: mol_type = genomic DNA
agggctgaggcttgggtgtaagg

SEQ ID NO: 3221 - DNA, 23 bp, Homo sapiens
  source 1..23: mol_type = genomic DNA
aggggaaaggcctgggtaatggg

SEQ ID NO: 3222 - DNA, 23 bp, Homo sapiens
  source 1..23: mol_type = genomic DNA
aggggagccccgggcgccgtggg

SEQ ID NO: 3223 - DNA, 23 bp, Homo sapiens
  source 1..23: mol_type = genomic DNA
aggggagccgcgggagccgtggg

SEQ ID NO: 3224 - DNA, 23 bp, Homo sapiens
  source 1..23: mol_type = genomic DNA
aggggagccgcgggcgccgtggg

SEQ ID NO: 3225 - DNA, 23 bp, Homo sapiens
  source 1..23: mol_type = genomic DNA
aggggccctgaccctgctaaagg

SEQ ID NO: 3226 - DNA, 23 bp, Homo sapiens
  source 1..23: mol_type = genomic DNA
aggggccctgaccctgctgaagg

SEQ ID NO: 3227 - DNA, 23 bp, Homo sapiens
  source 1..23: mol_type = genomic DNA
aggggccggaatattgggaccgg

SEQ ID NO: 3228 - DNA, 23 bp, Homo sapiens
  source 1..23: mol_type = genomic DNA
aggggccggagtattgggaccgg

SEQ ID NO: 3229 - DNA, 23 bp, Homo sapiens
  source 1..23: mol_type = genomic DNA
aggggccggagtattgggacggg

SEQ ID NO: 3230 - DNA, 23 bp, Homo sapiens
  source 1..23: mol_type = genomic DNA
aggggggcggatctcggacccgg

SEQ ID NO: 3231 - DNA, 23 bp, Homo sapiens
  source 1..23: mol_type = genomic DNA
aggggggtggatctcggacccgg

SEQ ID NO: 3232 - DNA, 23 bp, Homo sapiens
  source 1..23: mol_type = genomic DNA
agggggtcggatctcggacccgg

SEQ ID NO: 3233 - DNA, 23 bp, Homo sapiens
  source 1..23: mol_type = genomic DNA
aggggtcacagtggacacaaggg

SEQ ID NO: 3234 - DNA, 23 bp, Homo sapiens
  source 1..23: mol_type = genomic DNA
aggggtcacagtggacacggggg

SEQ ID NO: 3235 - DNA, 23 bp, Homo sapiens
  source 1..23: mol_type = genomic DNA
aggggtcacggtggacacggggg

SEQ ID NO: 3236 - DNA, 23 bp, Homo sapiens
  source 1..23: mol_type = genomic DNA
aggggtcagggcgaagtaccagg

SEQ ID NO: 3237 - DNA, 23 bp, Homo sapiens
  source 1..23: mol_type = genomic DNA
aggggtcagggcgaagtcccagg

SEQ ID NO: 3238 - DNA, 23 bp, Homo sapiens
  source 1..23: mol_type = genomic DNA
aggggtcatatctcttctcaggg

SEQ ID NO: 3239 - DNA, 23 bp, Homo sapiens
  source 1..23: mol_type = genomic DNA
aggggtcatatctgttctcaggg

SEQ ID NO: 3240 - DNA, 23 bp, Homo sapiens
  source 1..23: mol_type = genomic DNA
aggggtcatgtgtcttctcaggg

SEQ ID NO: 3241 - DNA, 23 bp, Homo sapiens
  source 1..23: mol_type = genomic DNA
aggggtcctgaccctgctgaagg

SEQ ID NO: 3242 - DNA, 23 bp, Homo sapiens
  source 1..23: mol_type = genomic DNA
aggggtcgggacctgcgccccgg

SEQ ID NO: 3243 - DNA, 23 bp, Homo sapiens
  source 1..23: mol_type = genomic DNA
aggggtcgtgacctgcgccccgg

SEQ ID NO: 3244 - DNA, 23 bp, Homo sapiens
  source 1..23: mol_type = genomic DNA
aggggtgaagagcggggtctggg

SEQ ID NO: 3245 - DNA, 23 bp, Homo sapiens
  source 1..23: mol_type = genomic DNA
aggggtgaggagtggggtctggg

SEQ ID NO: 3246 - DNA, 23 bp, Homo sapiens
  source 1..23: mol_type = genomic DNA
aggggtgaggggtggggtctggg

SEQ ID NO: 3247 - DNA, 23 bp, Homo sapiens
  source 1..23: mol_type = genomic DNA
aggggtgatgtgtcttctcaggg

SEQ ID NO: 3248 - DNA, 23 bp, Homo sapiens
  source 1..23: mol_type = genomic DNA
agggtacttcaagtcacaaaggg

SEQ ID NO: 3249 - DNA, 23 bp, Homo sapiens
  source 1..23: mol_type = genomic DNA
agggtccggagtattgggacggg

SEQ ID NO: 3250 - DNA, 23 bp, Homo sapiens
  source 1..23: mol_type = genomic DNA
agggtctcaggccccgaaggcgg

SEQ ID NO: 3251 - DNA, 23 bp, Homo sapiens
  source 1..23: mol_type = genomic DNA
agggtgtgagaccctggcccagg

SEQ ID NO: 3252 - DNA, 23 bp, Homo sapiens
  source 1..23: mol_type = genomic DNA
agggtgtgagaccctggccccgg

SEQ ID NO: 3253 - DNA, 23 bp, Homo sapiens
  source 1..23: mol_type = genomic DNA
agggttcttcaagtcacaaaggg

SEQ ID NO: 3254 - DNA, 23 bp, Homo sapiens
  source 1..23: mol_type = genomic DNA
aggtcagggctgaggcttggggg

SEQ ID NO: 3255 - DNA, 23 bp, Homo sapiens
  source 1..23: mol_type = genomic DNA
aggtcagtgtgatctccacaggg

SEQ ID NO: 3256 - DNA, 23 bp, Homo sapiens
  source 1..23: mol_type = genomic DNA
aggtcagtgtgatctccccaggg

SEQ ID NO: 3257 - DNA, 23 bp, Homo sapiens
  source 1..23: mol_type = genomic DNA
aggtcagtgtgatctccgcaggg

SEQ ID NO: 3258 - DNA, 23 bp, Homo sapiens
  source 1..23: mol_type = genomic DNA
aggtcagtgtgatctccgtaggg

SEQ ID NO: 3259 - DNA, 23 bp, Homo sapiens
  source 1..23: mol_type = genomic DNA
aggtcagtgtgatctctgcaggg

SEQ ID NO: 3260 - DNA, 23 bp, Homo sapiens
  source 1..23: mol_type = genomic DNA
aggtcccggacggggctctcagg

SEQ ID NO: 3261 - DNA, 23 bp, Homo sapiens
  source 1..23: mol_type = genomic DNA
aggtcccgggcggggctctcagg

SEQ ID NO: 3262 - DNA, 23 bp, Homo sapiens
  source 1..23: mol_type = genomic DNA
aggtcccgggcggggctctctgg

SEQ ID NO: 3263 - DNA, 23 bp, Homo sapiens
  source 1..23: mol_type = genomic DNA
aggtcccgggcggggttctcagg

SEQ ID NO: 3264 - DNA, 23 bp, Homo sapiens
  source 1..23: mol_type = genomic DNA
aggtcctgcgcccccgcctgcgg

SEQ ID NO: 3265 - DNA, 23 bp, Homo sapiens
  source 1..23: mol_type = genomic DNA
aggtgagtgcggggtcgggaggg

SEQ ID NO: 3266 - DNA, 23 bp, Homo sapiens
  source 1..23: mol_type = genomic DNA
aggtggaggaggaagagctcagg

SEQ ID NO: 3267 - DNA, 23 bp, Homo sapiens
  source 1..23: mol_type = genomic DNA
aggtggggcacacttctacctgg

SEQ ID NO: 3268 - DNA, 23 bp, Homo sapiens
  source 1..23: mol_type = genomic DNA
aggtggggtgaagggatgaaggg

SEQ ID NO: 3269 - DNA, 23 bp, Homo sapiens
  source 1..23: mol_type = genomic DNA
aggtggggtgaaggggtgaaggg

SEQ ID NO: 3270 - DNA, 23 bp, Homo sapiens
  source 1..23: mol_type = genomic DNA
aggtgggtgggctcccccatggg

SEQ ID NO: 3271 - DNA, 23 bp, Homo sapiens
  source 1..23: mol_type = genomic DNA
aggttgcgtgtaagtgatggcgg

SEQ ID NO: 3272 - DNA, 23 bp, Homo sapiens
  source 1..23: mol_type = genomic DNA
aggttggtcggggcggggcgggg

SEQ ID NO: 3273 - DNA, 23 bp, Homo sapiens
  source 1..23: mol_type = genomic DNA
agtagaacaaaaacaggacctgg

SEQ ID NO: 3274 - DNA, 23 bp, Homo sapiens
  source 1..23: mol_type = genomic DNA
agtagaaccaaaacaggacctgg

SEQ ID NO: 3275 - DNA, 23 bp, Homo sapiens
  source 1..23: mol_type = genomic DNA
agtagcaggacgagggttcgggg

SEQ ID NO: 3276 - DNA, 23 bp, Homo sapiens
  source 1..23: mol_type = genomic DNA
agtagcaggaggagggttcgggg

SEQ ID NO: 3277 - DNA, 23 bp, Homo sapiens
  source 1..23: mol_type = genomic DNA
agtagccgcgcagggtccccagg

SEQ ID NO: 3278 - DNA, 23 bp, Homo sapiens
  source 1..23: mol_type = genomic DNA
agtagccgcgcagggtccgcagg

SEQ ID NO: 3279 - DNA, 23 bp, Homo sapiens
  source 1..23: mol_type = genomic DNA
agtagccgcgcaggttccgcagg

SEQ ID NO: 3280 - DNA, 23 bp, Homo sapiens
  source 1..23: mol_type = genomic DNA
agtagccgcgcagtttccgcagg

SEQ ID NO: 3281 - DNA, 23 bp, Homo sapiens
  source 1..23: mol_type = genomic DNA
agtagcggagcagggtccgcagg

SEQ ID NO: 3282 - DNA, 23 bp, Homo sapiens
  source 1..23: mol_type = genomic DNA
agtagcggagcgcgatccgcagg

SEQ ID NO: 3283 - DNA, 23 bp, Homo sapiens
  source 1..23: mol_type = genomic DNA
agtagcggagcgcggtgcgcagg

SEQ ID NO: 3284 - DNA, 23 bp, Homo sapiens
  source 1..23: mol_type = genomic DNA
agtagctgcgcaggttccgcagg

SEQ ID NO: 3285 - DNA, 23 bp, Homo sapiens
  source 1..23: mol_type = genomic DNA
agtattgggaccaggagacacgg

SEQ ID NO: 3286 - DNA, 23 bp, Homo sapiens
  source 1..23: mol_type = genomic DNA
agtattgggaccggaacacacgg

SEQ ID NO: 3287 - DNA, 23 bp, Homo sapiens
  source 1..23: mol_type = genomic DNA
agtattgggaccgggagacacgg

SEQ ID NO: 3288 - DNA, 23 bp, Homo sapiens
  source 1..23: mol_type = genomic DNA
agtattgggacctgcagacacgg

SEQ ID NO: 3289 - DNA, 23 bp, Homo sapiens
  source 1..23: mol_type = genomic DNA
agtattgggacgaggagacacgg

SEQ ID NO: 3290 - DNA, 23 bp, Homo sapiens
  source 1..23: mol_type = genomic DNA
agtattgggacgaggagacaggg

SEQ ID NO: 3291 - DNA, 23 bp, Homo sapiens
  source 1..23: mol_type = genomic DNA
agtattgggacggggagacacgg

SEQ ID NO: 3292 - DNA, 23 bp, Homo sapiens
  source 1..23: mol_type = genomic DNA
agtcagggccatgcgatcttagg

SEQ ID NO: 3293 - DNA, 23 bp, Homo sapiens
  source 1..23: mol_type = genomic DNA
agtccctagaatactgatcaggg

SEQ ID NO: 3294 - DNA, 23 bp, Homo sapiens
  source 1..23: mol_type = genomic DNA
agtccctaggatagtgatcaggg

SEQ ID NO: 3295 - DNA, 23 bp, Homo sapiens
  source 1..23: mol_type = genomic DNA
agtccctggaatactgatcaggg

SEQ ID NO: 3296 - DNA, 23 bp, Homo sapiens
  source 1..23: mol_type = genomic DNA
agtcctggagcccttcagccagg

SEQ ID NO: 3297 - DNA, 23 bp, Homo sapiens
  source 1..23: mol_type = genomic DNA
agtcctggagcccttcagccggg

SEQ ID NO: 3298 - DNA, 23 bp, Homo sapiens
  source 1..23: mol_type = genomic DNA
agtcctggagcccttcagctggg

SEQ ID NO: 3299 - DNA, 23 bp, Homo sapiens
  source 1..23: mol_type = genomic DNA
agtgcgggtcggcagggaaatgg

SEQ ID NO: 3300 - DNA, 23 bp, Homo sapiens
  source 1..23: mol_type = genomic DNA
agtgcgggtcgggagggaaatgg

SEQ ID NO: 3301 - DNA, 23 bp, Homo sapiens
  source 1..23: mol_type = genomic DNA
agtgctggcacacagggcccagg

SEQ ID NO: 3302 - DNA, 23 bp, Homo sapiens
  source 1..23: mol_type = genomic DNA
agtggacacagctgtgctatggg

SEQ ID NO: 3303 - DNA, 23 bp, Homo sapiens
  source 1..23: mol_type = genomic DNA
agtggacgcagctgtgctatggg

SEQ ID NO: 3304 - DNA, 23 bp, Homo sapiens
  source 1..23: mol_type = genomic DNA
agtggccctgaccgagacctggg

SEQ ID NO: 3305 - DNA, 23 bp, Homo sapiens
  source 1..23: mol_type = genomic DNA
agtggcctcatggtcagagatgg

SEQ ID NO: 3306 - DNA, 23 bp, Homo sapiens
  source 1..23: mol_type = genomic DNA
agtgggagcctggggcaaggagg

SEQ ID NO: 3307 - DNA, 23 bp, Homo sapiens
  source 1..23: mol_type = genomic DNA
agtgggcgggggggcggggaggg

SEQ ID NO: 3308 - DNA, 23 bp, Homo sapiens
  source 1..23: mol_type = genomic DNA
agtgggcggggggggcggggagg

SEQ ID NO: 3309 - DNA, 23 bp, Homo sapiens
  source 1..23: mol_type = genomic DNA
agtgggcggggggggtggggtgg

SEQ ID NO: 3310 - DNA, 23 bp, Homo sapiens
  source 1..23: mol_type = genomic DNA
agtgggcggggggggtggtgggg

SEQ ID NO: 3311 - DNA, 23 bp, Homo sapiens
  source 1..23: mol_type = genomic DNA
agtgggtggggtggcaggtctgg

SEQ ID NO: 3312 - DNA, 23 bp, Homo sapiens
  source 1..23: mol_type = genomic DNA
agtgggtggggtggcgggtctgg

SEQ ID NO: 3313 - DNA, 23 bp, Homo sapiens
  source 1..23: mol_type = genomic DNA
agtggtcaaagtggtcaaagggg

SEQ ID NO: 3314 - DNA, 23 bp, Homo sapiens
  source 1..23: mol_type = genomic DNA
agtggtcgggggtggggcagagg

SEQ ID NO: 3315 - DNA, 23 bp, Homo sapiens
  source 1..23: mol_type = genomic DNA
agtggtctggggtggggcagagg

SEQ ID NO: 3316 - DNA, 23 bp, Homo sapiens
  source 1..23: mol_type = genomic DNA
agtgtgccccacctcgttactgg

SEQ ID NO: 3317 - DNA, 23 bp, Homo sapiens
  source 1..23: mol_type = genomic DNA
agtgtgccccgccttgttactgg

SEQ ID NO: 3318 - DNA, 23 bp, Homo sapiens
  source 1..23: mol_type = genomic DNA
agtgtgccctgcctcgttactgg

SEQ ID NO: 3319 - DNA, 23 bp, Homo sapiens
  source 1..23: mol_type = genomic DNA
agtgttccctgcatcattactgg

SEQ ID NO: 3320 - DNA, 23 bp, Homo sapiens
  source 1..23: mol_type = genomic DNA
agtgttccctgcctcattactgg

SEQ ID NO: 3321 - DNA, 23 bp, Homo sapiens
  source 1..23: mol_type = genomic DNA
agttgaggccaaaatccccgcgg

SEQ ID NO: 3322 - DNA, 23 bp, Homo sapiens
  source 1..23: mol_type = genomic DNA
agttggggaatccccaaggctgg

SEQ ID NO: 3323 - DNA, 23 bp, Homo sapiens
  source 1..23: mol_type = genomic DNA
agttgtggtcatcggagctgtgg

SEQ ID NO: 3324 - DNA, 23 bp, Homo sapiens
  source 1..23: mol_type = genomic DNA
agtttaggccaaaatccccgcgg

SEQ ID NO: 3325 - DNA, 23 bp, Homo sapiens
  source 1..23: mol_type = genomic DNA
ataatgtatggctgcgacgtggg

SEQ ID NO: 3326 - DNA, 23 bp, Homo sapiens
  source 1..23: mol_type = genomic DNA
atacataggaggaagagctcagg

SEQ ID NO: 3327 - DNA, 23 bp, Homo sapiens
  source 1..23: mol_type = genomic DNA
atacttctggaaattccttttgg

SEQ ID NO: 3328 - DNA, 23 bp, Homo sapiens
  source 1..23: mol_type = genomic DNA
ataggaggaagagctcaggtagg

SEQ ID NO: 3329 - DNA, 23 bp, Homo sapiens
  source 1..23: mol_type = genomic DNA
atagggacgtttcgaatgtgtgg

SEQ ID NO: 3330 - DNA, 23 bp, Homo sapiens
  source 1..23: mol_type = genomic DNA
atagggcattttcttcccacagg

SEQ ID NO: 3331 - DNA, 23 bp, Homo sapiens
  source 1..23: mol_type = genomic DNA
atagttctggaaacttctcttgg

SEQ ID NO: 3332 - DNA, 23 bp, Homo sapiens
  source 1..23: mol_type = genomic DNA
atatgtatggctgcgacgtgggg

SEQ ID NO: 3333 - DNA, 23 bp, Homo sapiens
  source 1..23: mol_type = genomic DNA
atattgtggttgggagcccatgg

SEQ ID NO: 3334 - DNA, 23 bp, Homo sapiens
  source 1..23: mol_type = genomic DNA
atattgtgtttgggagcccatgg

SEQ ID NO: 3335 - DNA, 23 bp, Homo sapiens
  source 1..23: mol_type = genomic DNA
atattgtgtttgggagcccgtgg

SEQ ID NO: 3336 - DNA, 23 bp, Homo sapiens
  source 1..23: mol_type = genomic DNA
atcactgggatattgtgtttggg

SEQ ID NO: 3337 - DNA, 23 bp, Homo sapiens
  source 1..23: mol_type = genomic DNA
atcatgggcccacccagcctggg

SEQ ID NO: 3338 - DNA, 23 bp, Homo sapiens
  source 1..23: mol_type = genomic DNA
atcatgggccgacccagcctggg

SEQ ID NO: 3339 - DNA, 23 bp, Homo sapiens
  source 1..23: mol_type = genomic DNA
atcatgggcctacccagcctggg

SEQ ID NO: 3340 - DNA, 23 bp, Homo sapiens
  source 1..23: mol_type = genomic DNA
atcatgggcctacccagtctggg

SEQ ID NO: 3341 - DNA, 23 bp, Homo sapiens
  source 1..23: mol_type = genomic DNA
atccaatacccaatgggagtggg

SEQ ID NO: 3342 - DNA, 23 bp, Homo sapiens
  source 1..23: mol_type = genomic DNA
atccacccccctgaggccgcggg

SEQ ID NO: 3343 - DNA, 23 bp, Homo sapiens
  source 1..23: mol_type = genomic DNA
atccctcgaatactgatgactgg

SEQ ID NO: 3344 - DNA, 23 bp, Homo sapiens
  source 1..23: mol_type = genomic DNA
atccctcgaatactgatgagtgg

SEQ ID NO: 3345 - DNA, 23 bp, Homo sapiens
  source 1..23: mol_type = genomic DNA
atccgacacccaatgggagtggg

SEQ ID NO: 3346 - DNA, 23 bp, Homo sapiens
  source 1..23: mol_type = genomic DNA
atccgaccccctgaggccgcggg

SEQ ID NO: 3347 - DNA, 23 bp, Homo sapiens
  source 1..23: mol_type = genomic DNA
atccgcccccctgaggccgcggg

SEQ ID NO: 3348 - DNA, 23 bp, Homo sapiens
  source 1..23: mol_type = genomic DNA
atccgcctccctgaggccgcggg

SEQ ID NO: 3349 - DNA, 23 bp, Homo sapiens
  source 1..23: mol_type = genomic DNA
atctcagacccggagactcgggg

SEQ ID NO: 3350 - DNA, 23 bp, Homo sapiens
  source 1..23: mol_type = genomic DNA
atctcagaccgggagactcgggg

SEQ ID NO: 3351 - DNA, 23 bp, Homo sapiens
  source 1..23: mol_type = genomic DNA
atctcagaccgggagacttgggg

SEQ ID NO: 3352 - DNA, 23 bp, Homo sapiens
  source 1..23: mol_type = genomic DNA
atctcagacggggagactcgggg

SEQ ID NO: 3353 - DNA, 23 bp, Homo sapiens
  source 1..23: mol_type = genomic DNA
atctcagacggggagactctagg

SEQ ID NO: 3354 - DNA, 23 bp, Homo sapiens
  source 1..23: mol_type = genomic DNA
atctcagacggggagactctggg

SEQ ID NO: 3355 - DNA, 23 bp, Homo sapiens
  source 1..23: mol_type = genomic DNA
atctcagggtgaggggcttgggg

SEQ ID NO: 3356 - DNA, 23 bp, Homo sapiens
  source 1..23: mol_type = genomic DNA
atctcagtgggctacgtggacgg

SEQ ID NO: 3357 - DNA, 23 bp, Homo sapiens
  source 1..23: mol_type = genomic DNA
atctcctgcgggctctgaccagg

SEQ ID NO: 3358 - DNA, 23 bp, Homo sapiens
  source 1..23: mol_type = genomic DNA
atctcctgtgggctctgaccagg

SEQ ID NO: 3359 - DNA, 23 bp, Homo sapiens
  source 1..23: mol_type = genomic DNA
atctcggacccggagactcgggg

SEQ ID NO: 3360 - DNA, 23 bp, Homo sapiens
  source 1..23: mol_type = genomic DNA
atctcggacccggagactgtggg

SEQ ID NO: 3361 - DNA, 23 bp, Homo sapiens
  source 1..23: mol_type = genomic DNA
atctggagggtgtgagaacctgg

SEQ ID NO: 3362 - DNA, 23 bp, Homo sapiens
  source 1..23: mol_type = genomic DNA
atctggatggtgtgagaacctgg

SEQ ID NO: 3363 - DNA, 23 bp, Homo sapiens
  source 1..23: mol_type = genomic DNA
atcttctgtgggatctgaccagg

SEQ ID NO: 3364 - DNA, 23 bp, Homo sapiens
  source 1..23: mol_type = genomic DNA
atgaagccaccctgaggtgctgg

SEQ ID NO: 3365 - DNA, 23 bp, Homo sapiens
  source 1..23: mol_type = genomic DNA
atgaaggaccctacgtaggttgg

SEQ ID NO: 3366 - DNA, 23 bp, Homo sapiens
  source 1..23: mol_type = genomic DNA
atgaaggaggctgatgcctgagg

SEQ ID NO: 3367 - DNA, 23 bp, Homo sapiens
  source 1..23: mol_type = genomic DNA
atgacccgcatctcggcctctgg

SEQ ID NO: 3368 - DNA, 23 bp, Homo sapiens
  source 1..23: mol_type = genomic DNA
atgacccgcatctcggcgtctgg

SEQ ID NO: 3369 - DNA, 23 bp, Homo sapiens
  source 1..23: mol_type = genomic DNA
atgaggccaccctgaggtgctgg

SEQ ID NO: 3370 - DNA, 23 bp, Homo sapiens
  source 1..23: mol_type = genomic DNA
atgaggccactctgagatgctgg

SEQ ID NO: 3371 - DNA, 23 bp, Homo sapiens
  source 1..23: mol_type = genomic DNA
atgaggccactctgaggtgctgg

SEQ ID NO: 3372 - DNA, 23 bp, Homo sapiens
  source 1..23: mol_type = genomic DNA
atgaggtcaccctgaggtgctgg

SEQ ID NO: 3373 - DNA, 23 bp, Homo sapiens
  source 1..23: mol_type = genomic DNA
atgatgtatggctgccacgtggg

SEQ ID NO: 3374 - DNA, 23 bp, Homo sapiens
  source 1..23: mol_type = genomic DNA
atgatgtatggctgcgacgtggg

SEQ ID NO: 3375 - DNA, 23 bp, Homo sapiens
  source 1..23: mol_type = genomic DNA
atgatgtgagaccctggccccgg

SEQ ID NO: 3376 - DNA, 23 bp, Homo sapiens
  source 1..23: mol_type = genomic DNA
atgatgtttggctgcgacgtggg

SEQ ID NO: 3377 - DNA, 23 bp, Homo sapiens
  source 1..23: mol_type = genomic DNA
atgcagggaacacttctacctgg

SEQ ID NO: 3378 - DNA, 23 bp, Homo sapiens
  source 1..23: mol_type = genomic DNA
atgcccaagttggggatggtggg

SEQ ID NO: 3379 - DNA, 23 bp, Homo sapiens
  source 1..23: mol_type = genomic DNA
atgcccacaatggggatggtggg

SEQ ID NO: 3380 - DNA, 23 bp, Homo sapiens
  source 1..23: mol_type = genomic DNA
atgcccacgatggggacggtggg

SEQ ID NO: 3381 - DNA, 23 bp, Homo sapiens
  source 1..23: mol_type = genomic DNA
atgcccacgatggggatggtggg

SEQ ID NO: 3382 - DNA, 23 bp, Homo sapiens
  source 1..23: mol_type = genomic DNA
atgcccacgatgtggacggtggg

SEQ ID NO: 3383 - DNA, 23 bp, Homo sapiens
  source 1..23: mol_type = genomic DNA
atgcccatgatggggatggtagg

SEQ ID NO: 3384 - DNA, 23 bp, Homo sapiens
  source 1..23: mol_type = genomic DNA
atgcccatgatggggatggtggg

SEQ ID NO: 3385 - DNA, 23 bp, Homo sapiens
  source 1..23: mol_type = genomic DNA
atggacaggacacccgggatggg

SEQ ID NO: 3386 - DNA, 23 bp, Homo sapiens
  source 1..23: mol_type = genomic DNA
atggacaggacacctgggatggg

SEQ ID NO: 3387 - DNA, 23 bp, Homo sapiens
  source 1..23: mol_type = genomic DNA
atggacaggacacctggggtagg

SEQ ID NO: 3388 - DNA, 23 bp, Homo sapiens
  source 1..23: mol_type = genomic DNA
atggacaggacacctggggtggg

SEQ ID NO: 3389 - DNA, 23 bp, Homo sapiens
  source 1..23: mol_type = genomic DNA
atggacaggacacctggtgtggg

SEQ ID NO: 3390 - DNA, 23 bp, Homo sapiens
  source 1..23: mol_type = genomic DNA
atggacgggacacctggggtggg

SEQ ID NO: 3391 - DNA, 23 bp, Homo sapiens
  source 1..23: mol_type = genomic DNA
atggaggggaagacagtccctgg

SEQ ID NO: 3392 - DNA, 23 bp, Homo sapiens
  source 1..23: mol_type = genomic DNA
atggagtaaggagggggatgagg

SEQ ID NO: 3393 - DNA, 23 bp, Homo sapiens
  source 1..23: mol_type = genomic DNA
atggatagagcaagaggggccgg

SEQ ID NO: 3394 - DNA, 23 bp, Homo sapiens
  source 1..23: mol_type = genomic DNA
atggatagagcaggaggggccgg

SEQ ID NO: 3395 - DNA, 23 bp, Homo sapiens
  source 1..23: mol_type = genomic DNA
atgggcaggacacctggggtggg

SEQ ID NO: 3396 - DNA, 23 bp, Homo sapiens
  source 1..23: mol_type = genomic DNA
atgggggtgtcatgtctcttagg

SEQ ID NO: 3397 - DNA, 23 bp, Homo sapiens
  source 1..23: mol_type = genomic DNA
atgggggtgtcatgtcttttagg

SEQ ID NO: 3398 - DNA, 23 bp, Homo sapiens
  source 1..23: mol_type = genomic DNA
atggggtaaggagggagacgggg

SEQ ID NO: 3399 - DNA, 23 bp, Homo sapiens
  source 1..23: mol_type = genomic DNA
atggggtaaggagggagatgggg

SEQ ID NO: 3400 - DNA, 23 bp, Homo sapiens
  source 1..23: mol_type = genomic DNA
atggggtaaggagggggatgagg

SEQ ID NO: 3401 - DNA, 23 bp, Homo sapiens
  source 1..23: mol_type = genomic DNA
atggtcagagacgagatggtggg

SEQ ID NO: 3402 - DNA, 23 bp, Homo sapiens
  source 1..23: mol_type = genomic DNA
atggtcagagacgggatggtggg

SEQ ID NO: 3403 - DNA, 23 bp, Homo sapiens
  source 1..23: mol_type = genomic DNA
atggtcagagacggggtggtggg

SEQ ID NO: 3404 - DNA, 23 bp, Homo sapiens
  source 1..23: mol_type = genomic DNA
atggtcagagagggggtggtggg

SEQ ID NO: 3405 - DNA, 23 bp, Homo sapiens
  source 1..23: mol_type = genomic DNA
atggtcagagatgggatggtggg

SEQ ID NO: 3406 - DNA, 23 bp, Homo sapiens
  source 1..23: mol_type = genomic DNA
atggtcagagatggggtggtggg

SEQ ID NO: 3407 - DNA, 23 bp, Homo sapiens
  source 1..23: mol_type = genomic DNA
atggtgtgagaccctggccccgg

SEQ ID NO: 3408 - DNA, 23 bp, Homo sapiens
  source 1..23: mol_type = genomic DNA
atggttcccaaggctgctgcagg

SEQ ID NO: 3409 - DNA, 23 bp, Homo sapiens
  source 1..23: mol_type = genomic DNA
atgtatcacctcgatggttgtgg

SEQ ID NO: 3410 - DNA, 23 bp, Homo sapiens
  source 1..23: mol_type = genomic DNA
atgtatcaccttgatgattatgg

SEQ ID NO: 3411 - DNA, 23 bp, Homo sapiens
  source 1..23: mol_type = genomic DNA
atgtatcaccttgatggttgtgg

SEQ ID NO: 3412 - DNA, 23 bp, Homo sapiens
  source 1..23: mol_type = genomic DNA
atgtatcaccttggtggttgtgg

SEQ ID NO: 3413 - DNA, 23 bp, Homo sapiens
  source 1..23: mol_type = genomic DNA
atgtatcgccttgatggttgtgg

SEQ ID NO: 3414 - DNA, 23 bp, Homo sapiens
  source 1..23: mol_type = genomic DNA
atgtcccggacggggctctcagg

SEQ ID NO: 3415 - DNA, 23 bp, Homo sapiens
  source 1..23: mol_type = genomic DNA
atgtctctcacagcttgtaaagg

SEQ ID NO: 3416 - DNA, 23 bp, Homo sapiens
  source 1..23: mol_type = genomic DNA
atgtgccctgtctcattactggg

SEQ ID NO: 3417 - DNA, 23 bp, Homo sapiens
  source 1..23: mol_type = genomic DNA
atgtgccctgtctcattcctggg

SEQ ID NO: 3418 - DNA, 23 bp, Homo sapiens
  source 1..23: mol_type = genomic DNA
atgtggaggaagaagagctcagg

SEQ ID NO: 3419 - DNA, 23 bp, Homo sapiens
  source 1..23: mol_type = genomic DNA
atgtggaggaggaacagctcagg

SEQ ID NO: 3420 - DNA, 23 bp, Homo sapiens
  source 1..23: mol_type = genomic DNA
atgtggaggaggaagagctcagg

SEQ ID NO: 3421 - DNA, 23 bp, Homo sapiens
  source 1..23: mol_type = genomic DNA
atgtgggacaagaggaattatgg

SEQ ID NO: 3422 - DNA, 23 bp, Homo sapiens
  source 1..23: mol_type = genomic DNA
atgtgtaggaggaagagctcagg

SEQ ID NO: 3423 - DNA, 23 bp, Homo sapiens
  source 1..23: mol_type = genomic DNA
atgtgtaggaggaagagttcagg

SEQ ID NO: 3424 - DNA, 23 bp, Homo sapiens
  source 1..23: mol_type = genomic DNA
atgttctgtgggatctgaccagg

SEQ ID NO: 3425 - DNA, 23 bp, Homo sapiens
  source 1..23: mol_type = genomic DNA
atgtttcctgatcccgccctggg

SEQ ID NO: 3426 - DNA, 23 bp, Homo sapiens
  source 1..23: mol_type = genomic DNA
atgtttcctgatcctgccctggg

SEQ ID NO: 3427 - DNA, 23 bp, Homo sapiens
  source 1..23: mol_type = genomic DNA
attaaggaatgacgtctctgagg

SEQ ID NO: 3428 - DNA, 23 bp, Homo sapiens
  source 1..23: mol_type = genomic DNA
attaagggatgaagtccctgagg

SEQ ID NO: 3429 - DNA, 23 bp, Homo sapiens
  source 1..23: mol_type = genomic DNA
attaagggatgaagtccttgagg

SEQ ID NO: 3430 - DNA, 23 bp, Homo sapiens
  source 1..23: mol_type = genomic DNA
attaagggatgaagtctctgagg

SEQ ID NO: 3431 - DNA, 23 bp, Homo sapiens
  source 1..23: mol_type = genomic DNA
attaagggatgacgtctctgagg

SEQ ID NO: 3432 - DNA, 23 bp, Homo sapiens
  source 1..23: mol_type = genomic DNA
attatgagcctacccagcctggg

SEQ ID NO: 3433 - DNA, 23 bp, Homo sapiens
  source 1..23: mol_type = genomic DNA
attatgggcctacccagcctggg

SEQ ID NO: 3434 - DNA, 23 bp, Homo sapiens
  source 1..23: mol_type = genomic DNA
attcatatccatcacagtgaggg

SEQ ID NO: 3435 - DNA, 23 bp, Homo sapiens
  source 1..23: mol_type = genomic DNA
attccagcattcatgagtcaggg

SEQ ID NO: 3436 - DNA, 23 bp, Homo sapiens
  source 1..23: mol_type = genomic DNA
attccagcattcgtgagtcaggg

SEQ ID NO: 3437 - DNA, 23 bp, Homo sapiens
  source 1..23: mol_type = genomic DNA
attcgaaacgtcccaatcaaagg

SEQ ID NO: 3438 - DNA, 23 bp, Homo sapiens
  source 1..23: mol_type = genomic DNA
attcgaaacgtccctatcaaagg

SEQ ID NO: 3439 - DNA, 23 bp, Homo sapiens
  source 1..23: mol_type = genomic DNA
attcgtatctgtcacagtgaggg

SEQ ID NO: 3440 - DNA, 23 bp, Homo sapiens
  source 1..23: mol_type = genomic DNA
attctgggagctgaagtggtcgg

SEQ ID NO: 3441 - DNA, 23 bp, Homo sapiens
  source 1..23: mol_type = genomic DNA
attgctggcctagttctctttgg

SEQ ID NO: 3442 - DNA, 23 bp, Homo sapiens
  source 1..23: mol_type = genomic DNA
attgctggcctggttctccttgg

SEQ ID NO: 3443 - DNA, 23 bp, Homo sapiens
  source 1..23: mol_type = genomic DNA
attgctggcctggttctctttgg

SEQ ID NO: 3444 - DNA, 23 bp, Homo sapiens
  source 1..23: mol_type = genomic DNA
attgggacgtttcgaatgtgtgg

SEQ ID NO: 3445 - DNA, 23 bp, Homo sapiens
  source 1..23: mol_type = genomic DNA
attgggacgtttcgagtgtgtgg

SEQ ID NO: 3446 - DNA, 23 bp, Homo sapiens
  source 1..23: mol_type = genomic DNA
attgggatgttacgcgtgtgtgg

SEQ ID NO: 3447 - DNA, 23 bp, Homo sapiens
  source 1..23: mol_type = genomic DNA
attgggatgtttcgcgtgtgtgg

SEQ ID NO: 3448 - DNA, 23 bp, Homo sapiens
  source 1..23: mol_type = genomic DNA
attggggaggcgcagcattgggg

SEQ ID NO: 3449 - DNA, 23 bp, Homo sapiens
  source 1..23: mol_type = genomic DNA
attggggaggcgcagcgttgggg

SEQ ID NO: 3450 - DNA, 23 bp, Homo sapiens
  source 1..23: mol_type = genomic DNA
attggggaggcgccgcgttgggg

SEQ ID NO: 3451 - DNA, 23 bp, Homo sapiens
  source 1..23: mol_type = genomic DNA
attggggagtcacagccttgggg

SEQ ID NO: 3452 - DNA, 23 bp, Homo sapiens
  source 1..23: mol_type = genomic DNA
attggggagtcccagccttgggg

SEQ ID NO: 3453 - DNA, 23 bp, Homo sapiens
  source 1..23: mol_type = genomic DNA
attgtcctagagagaagaggggg

SEQ ID NO: 3454 - DNA, 23 bp, Homo sapiens
  source 1..23: mol_type = genomic DNA
attgtcctagagagcagacgggg

SEQ ID NO: 3455 - DNA, 23 bp, Homo sapiens
  source 1..23: mol_type = genomic DNA
attgtcctagagagcagaggggg

SEQ ID NO: 3456 - DNA, 23 bp, Homo sapiens
  source 1..23: mol_type = genomic DNA
attgtggttgggagcccatgggg

SEQ ID NO: 3457 - DNA, 23 bp, Homo sapiens
  source 1..23: mol_type = genomic DNA
attgtgtttgggagcccatgggg

SEQ ID NO: 3458 - DNA, 23 bp, Homo sapiens
  source 1..23: mol_type = genomic DNA
attgtgtttgggagcccgtgggg

SEQ ID NO: 3459 - DNA, 23 bp, Homo sapiens
  source 1..23: mol_type = genomic DNA
atttatcaccttgattacagcgg

SEQ ID NO: 3460 - DNA, 23 bp, Homo sapiens
  source 1..23: mol_type = genomic DNA
atttatcaccttgattacggcgg

SEQ ID NO: 3461 - DNA, 23 bp, Homo sapiens
  source 1..23: mol_type = genomic DNA
atttatcaccttgattatggcgg

SEQ ID NO: 3462 - DNA, 23 bp, Homo sapiens
  source 1..23: mol_type = genomic DNA
atttcaccacatccgtgtcccgg

SEQ ID NO: 3463 - DNA, 23 bp, Homo sapiens
  source 1..23: mol_type = genomic DNA
atttcagcattcatgagtcaggg

SEQ ID NO: 3464 - DNA, 23 bp, Homo sapiens
  source 1..23: mol_type = genomic DNA
atttccacaccgccatgtcccgg

SEQ ID NO: 3465 - DNA, 23 bp, Homo sapiens
  source 1..23: mol_type = genomic DNA
atttccacacctccgtgtcccgg

SEQ ID NO: 3466 - DNA, 23 bp, Homo sapiens
  source 1..23: mol_type = genomic DNA
atttcgacaccgccatgtcccgg

SEQ ID NO: 3467 - DNA, 23 bp, Homo sapiens
  source 1..23: mol_type = genomic DNA
atttcgacaccgccgtgtcccgg

SEQ ID NO: 3468 - DNA, 23 bp, Homo sapiens
  source 1..23: mol_type = genomic DNA
atttctacaccgccatgtcccgg

SEQ ID NO: 3469 - DNA, 23 bp, Homo sapiens
  source 1..23: mol_type = genomic DNA
atttctacaccgccgtgtcccgg

SEQ ID NO: 3470 - DNA, 23 bp, Homo sapiens
  source 1..23: mol_type = genomic DNA
atttctacaccgctgtgtcccgg

SEQ ID NO: 3471 - DNA, 23 bp, Homo sapiens
  source 1..23: mol_type = genomic DNA
atttctacacctccatgtcccgg

SEQ ID NO: 3472 - DNA, 23 bp, Homo sapiens
  source 1..23: mol_type = genomic DNA
atttctacacctccgtgtcccgg

SEQ ID NO: 3473 - DNA, 23 bp, Homo sapiens
  source 1..23: mol_type = genomic DNA
atttctacacttccgtgtcccgg

SEQ ID NO: 3474 - DNA, 23 bp, Homo sapiens
  source 1..23: mol_type = genomic DNA
atttctccacatccgtgtcccgg

SEQ ID NO: 3475 - DNA, 23 bp, Homo sapiens
  source 1..23: mol_type = genomic DNA
atttctccacatccgtgtcctgg

SEQ ID NO: 3476 - DNA, 23 bp, Homo sapiens
  source 1..23: mol_type = genomic DNA
atttcttcacatccgtgtcccgg

SEQ ID NO: 3477 - DNA, 23 bp, Homo sapiens
  source 1..23: mol_type = genomic DNA
caaaatccccgcgggttgggcgg

SEQ ID NO: 3478 - DNA, 23 bp, Homo sapiens
  source 1..23: mol_type = genomic DNA
caaaatccccgcgggttggtcgg

SEQ ID NO: 3479 - DNA, 23 bp, Homo sapiens
  source 1..23: mol_type = genomic DNA
caaaatggccacatgcgtgctgg

SEQ ID NO: 3480 - DNA, 23 bp, Homo sapiens
  source 1..23: mol_type = genomic DNA
caaagagaaccaggccagcaagg

SEQ ID NO: 3481 - DNA, 23 bp, Homo sapiens
  source 1..23: mol_type = genomic DNA
caaagcccctcaccctgagatgg

SEQ ID NO: 3482 - DNA, 23 bp, Homo sapiens
  source 1..23: mol_type = genomic DNA
caacacacagacttaccgagagg

SEQ ID NO: 3483 - DNA, 23 bp, Homo sapiens
  source 1..23: mol_type = genomic DNA
caacacacatcaggccctccagg

SEQ ID NO: 3484 - DNA, 23 bp, Homo sapiens
  source 1..23: mol_type = genomic DNA
caacagccaccacagctcctagg

SEQ ID NO: 3485 - DNA, 23 bp, Homo sapiens
  source 1..23: mol_type = genomic DNA
caacagccaccatagctcctagg

SEQ ID NO: 3486 - DNA, 23 bp, Homo sapiens
  source 1..23: mol_type = genomic DNA
caacagccatcacagctcctagg

SEQ ID NO: 3487 - DNA, 23 bp, Homo sapiens
  source 1..23: mol_type = genomic DNA
caacagtcatgaacaaattctgg

SEQ ID NO: 3488 - DNA, 23 bp, Homo sapiens
  source 1..23: mol_type = genomic DNA
caacgagaagaagaggaaaatgg

SEQ ID NO: 3489 - DNA, 23 bp, Homo sapiens
  source 1..23: mol_type = genomic DNA
caagacccgggaagccgcgccgg

SEQ ID NO: 3490 - DNA, 23 bp, Homo sapiens
  source 1..23: mol_type = genomic DNA
caagactaggaggttcctctagg

SEQ ID NO: 3491 - DNA, 23 bp, Homo sapiens
  source 1..23: mol_type = genomic DNA
caagacttggaggttcctctagg

SEQ ID NO: 3492 - DNA, 23 bp, Homo sapiens
  source 1..23: mol_type = genomic DNA
caagatagccacatgtgtgctgg

SEQ ID NO: 3493 - DNA, 23 bp, Homo sapiens
  source 1..23: mol_type = genomic DNA
caagatggccacatgcatgctgg

SEQ ID NO: 3494 - DNA, 23 bp, Homo sapiens
  source 1..23: mol_type = genomic DNA
caagatggccacatgcgtgctgg

SEQ ID NO: 3495 - DNA, 23 bp, Homo sapiens
  source 1..23: mol_type = genomic DNA
caagcccctcaccctgagatggg

SEQ ID NO: 3496 - DNA, 23 bp, Homo sapiens
  source 1..23: mol_type = genomic DNA
caagctcagtgtcctgagtttgg

SEQ ID NO: 3497 - DNA, 23 bp, Homo sapiens
  source 1..23: mol_type = genomic DNA
caagctccgtgtcctgggtctgg

SEQ ID NO: 3498 - DNA, 23 bp, Homo sapiens
  source 1..23: mol_type = genomic DNA
caagctcggtgtcctgagtttgg

SEQ ID NO: 3499 - DNA, 23 bp, Homo sapiens
  source 1..23: mol_type = genomic DNA
caagctcggtgtcctgggtctgg

SEQ ID NO: 3500 - DNA, 23 bp, Homo sapiens
  source 1..23: mol_type = genomic DNA
caaggacagctaggacaaccagg

SEQ ID NO: 3501 - DNA, 23 bp, Homo sapiens
  source 1..23: mol_type = genomic DNA
caaggcacagactgaccgagagg

SEQ ID NO: 3502 - DNA, 23 bp, Homo sapiens
  source 1..23: mol_type = genomic DNA
caaggctacgaggttcctctagg

SEQ ID NO: 3503 - DNA, 23 bp, Homo sapiens
  source 1..23: mol_type = genomic DNA
caagggccgtgtctgcactgggg

SEQ ID NO: 3504 - DNA, 23 bp, Homo sapiens
  source 1..23: mol_type = genomic DNA
caagggccgtgtctgcattgggg

SEQ ID NO: 3505 - DNA, 23 bp, Homo sapiens
  source 1..23: mol_type = genomic DNA
caagtcacaaagggaagggcagg

SEQ ID NO: 3506 - DNA, 23 bp, Homo sapiens
  source 1..23: mol_type = genomic DNA
caagtgggagacggcccatgagg

SEQ ID NO: 3507 - DNA, 23 bp, Homo sapiens
  source 1..23: mol_type = genomic DNA
caagtgggaggcggcccatgagg

SEQ ID NO: 3508 - DNA, 23 bp, Homo sapiens
  source 1..23: mol_type = genomic DNA
caagtgggaggcggcccatgcgg

SEQ ID NO: 3509 - DNA, 23 bp, Homo sapiens
  source 1..23: mol_type = genomic DNA
caagtgggaggcggcccatgtgg

SEQ ID NO: 3510 - DNA, 23 bp, Homo sapiens
  source 1..23: mol_type = genomic DNA
caagtgggaggcggcccgtacgg

SEQ ID NO: 3511 - DNA, 23 bp, Homo sapiens
  source 1..23: mol_type = genomic DNA
caagtgggaggcggcccgtcggg

SEQ ID NO: 3512 - DNA, 23 bp, Homo sapiens
  source 1..23: mol_type = genomic DNA
caagtgggaggcggcccgtgagg

SEQ ID NO: 3513 - DNA, 23 bp, Homo sapiens
  source 1..23: mol_type = genomic DNA
caagtgggaggcggcccgtgcgg

SEQ ID NO: 3514 - DNA, 23 bp, Homo sapiens
  source 1..23: mol_type = genomic DNA
caagtgggaggcggcccgtgtgg

SEQ ID NO: 3515 - DNA, 23 bp, Homo sapiens
  source 1..23: mol_type = genomic DNA
caagtgggaggcggcccgttggg

SEQ ID NO: 3516 - DNA, 23 bp, Homo sapiens
  source 1..23: mol_type = genomic DNA
caagtgggaggcggtccatgcgg

SEQ ID NO: 3517 - DNA, 23 bp, Homo sapiens
  source 1..23: mol_type = genomic DNA
caagtgtgagaccctggcccagg

SEQ ID NO: 3518 - DNA, 23 bp, Homo sapiens
  source 1..23: mol_type = genomic DNA
caagtgtgagaccctggccccgg

SEQ ID NO: 3519 - DNA, 23 bp, Homo sapiens
  source 1..23: mol_type = genomic DNA
caagttggaggcggcccgtgagg

SEQ ID NO: 3520 - DNA, 23 bp, Homo sapiens
  source 1..23: mol_type = genomic DNA
caagttggaggcggcccgtgcgg

SEQ ID NO: 3521 - DNA, 23 bp, Homo sapiens
  source 1..23: mol_type = genomic DNA
caagttggaggcggcccgtgtgg

SEQ ID NO: 3522 - DNA, 23 bp, Homo sapiens
  source 1..23: mol_type = genomic DNA
caagttggggatggtgggctggg

SEQ ID NO: 3523 - DNA, 23 bp, Homo sapiens
  source 1..23: mol_type = genomic DNA
caatagtcatgaacaaattcagg

SEQ ID NO: 3524 - DNA, 23 bp, Homo sapiens
  source 1..23: mol_type = genomic DNA
caatccaccgtccccatcgtggg

SEQ ID NO: 3525 - DNA, 23 bp, Homo sapiens
  source 1..23: mol_type = genomic DNA
caatccatacaccgccttcgggg

SEQ ID NO: 3526 - DNA, 23 bp, Homo sapiens
  source 1..23: mol_type = genomic DNA
caatccatataccgccttcgggg

SEQ ID NO: 3527 - DNA, 23 bp, Homo sapiens
  source 1..23: mol_type = genomic DNA
caatgaagcggggctccccgcgg

SEQ ID NO: 3528 - DNA, 23 bp, Homo sapiens
  source 1..23: mol_type = genomic DNA
caatggggaggcgcagcgttggg

SEQ ID NO: 3529 - DNA, 23 bp, Homo sapiens
  source 1..23: mol_type = genomic DNA
caattgtctcccctccttgtggg

SEQ ID NO: 3530 - DNA, 23 bp, Homo sapiens
  source 1..23: mol_type = genomic DNA
cacaaggaggggagacaattggg

SEQ ID NO: 3531 - DNA, 23 bp, Homo sapiens
  source 1..23: mol_type = genomic DNA
cacaatatcccaaggacctcagg

SEQ ID NO: 3532 - DNA, 23 bp, Homo sapiens
  source 1..23: mol_type = genomic DNA
cacaatggggatggtgggctggg

SEQ ID NO: 3533 - DNA, 23 bp, Homo sapiens
  source 1..23: mol_type = genomic DNA
cacacacaggcagcagccttggg

SEQ ID NO: 3534 - DNA, 23 bp, Homo sapiens
  source 1..23: mol_type = genomic DNA
cacacaccggcagcagccttggg

SEQ ID NO: 3535 - DNA, 23 bp, Homo sapiens
  source 1..23: mol_type = genomic DNA
cacacaccggcggcagccttggg

SEQ ID NO: 3536 - DNA, 23 bp, Homo sapiens
  source 1..23: mol_type = genomic DNA
cacacagggcccaggctgggtgg

SEQ ID NO: 3537 - DNA, 23 bp, Homo sapiens
  source 1..23: mol_type = genomic DNA
cacaccatccagaggatgtatgg

SEQ ID NO: 3538 - DNA, 23 bp, Homo sapiens
  source 1..23: mol_type = genomic DNA
cacaccatccagaggatgtctgg

SEQ ID NO: 3539 - DNA, 23 bp, Homo sapiens
  source 1..23: mol_type = genomic DNA
cacaccatccagataatgtatgg

SEQ ID NO: 3540 - DNA, 23 bp, Homo sapiens
  source 1..23: mol_type = genomic DNA
cacaccatccagatgatgtatgg

SEQ ID NO: 3541 - DNA, 23 bp, Homo sapiens
  source 1..23: mol_type = genomic DNA
cacaccctccagaatatgtatgg

SEQ ID NO: 3542 - DNA, 23 bp, Homo sapiens
  source 1..23: mol_type = genomic DNA
cacaccctccagagcatgtacgg

SEQ ID NO: 3543 - DNA, 23 bp, Homo sapiens
  source 1..23: mol_type = genomic DNA
cacaccctccagaggatgtacgg

SEQ ID NO: 3544 - DNA, 23 bp, Homo sapiens
  source 1..23: mol_type = genomic DNA
cacaccctccagaggatgtatgg

SEQ ID NO: 3545 - DNA, 23 bp, Homo sapiens
  source 1..23: mol_type = genomic DNA
cacaccctccagaggatgtctgg

SEQ ID NO: 3546 - DNA, 23 bp, Homo sapiens
  source 1..23: mol_type = genomic DNA
cacaccctccagaggatgtttgg

SEQ ID NO: 3547 - DNA, 23 bp, Homo sapiens
  source 1..23: mol_type = genomic DNA
cacaccctccagatgatgtttgg

SEQ ID NO: 3548 - DNA, 23 bp, Homo sapiens
  source 1..23: mol_type = genomic DNA
cacaccctccagtggatgtacgg

SEQ ID NO: 3549 - DNA, 23 bp, Homo sapiens
  source 1..23: mol_type = genomic DNA
cacaccctccagtggatgtatgg

SEQ ID NO: 3550 - DNA, 23 bp, Homo sapiens
  source 1..23: mol_type = genomic DNA
cacaccctccagtggatgtgtgg

SEQ ID NO: 3551 - DNA, 23 bp, Homo sapiens
  source 1..23: mol_type = genomic DNA
cacaccctccagtggatgtttgg

SEQ ID NO: 3552 - DNA, 23 bp, Homo sapiens
  source 1..23: mol_type = genomic DNA
cacaccgccatgtcccggcccgg

SEQ ID NO: 3553 - DNA, 23 bp, Homo sapiens
  source 1..23: mol_type = genomic DNA
cacaccgtccagaggatgtatgg

SEQ ID NO: 3554 - DNA, 23 bp, Homo sapiens
  source 1..23: mol_type = genomic DNA
cacacctccgtgtcccggcccgg

SEQ ID NO: 3555 - DNA, 23 bp, Homo sapiens
  source 1..23: mol_type = genomic DNA
cacaccttccagaggatgtatgg

SEQ ID NO: 3556 - DNA, 23 bp, Homo sapiens
  source 1..23: mol_type = genomic DNA
cacacttggcagacgatgtatgg

SEQ ID NO: 3557 - DNA, 23 bp, Homo sapiens
  source 1..23: mol_type = genomic DNA
cacacttggcagaggatgtatgg

SEQ ID NO: 3558 - DNA, 23 bp, Homo sapiens
  source 1..23: mol_type = genomic DNA
cacagacgcccacttctggaagg

SEQ ID NO: 3559 - DNA, 23 bp, Homo sapiens
  source 1..23: mol_type = genomic DNA
cacagccacccacttctggaagg

SEQ ID NO: 3560 - DNA, 23 bp, Homo sapiens
  source 1..23: mol_type = genomic DNA
cacagccgcccacttctggaagg

SEQ ID NO: 3561 - DNA, 23 bp, Homo sapiens
  source 1..23: mol_type = genomic DNA
cacagctgcccacttctggaagg

SEQ ID NO: 3562 - DNA, 23 bp, Homo sapiens
  source 1..23: mol_type = genomic DNA
cacagctgtccacttctggaagg

SEQ ID NO: 3563 - DNA, 23 bp, Homo sapiens
  source 1..23: mol_type = genomic DNA
cacaggagacgtgggacaggagg

SEQ ID NO: 3564 - DNA, 23 bp, Homo sapiens
  source 1..23: mol_type = genomic DNA
cacaggagatgtgggacaagagg

SEQ ID NO: 3565 - DNA, 23 bp, Homo sapiens
  source 1..23: mol_type = genomic DNA
cacaggcccaggtctcggtcagg

SEQ ID NO: 3566 - DNA, 23 bp, Homo sapiens
  source 1..23: mol_type = genomic DNA
cacaggggctaacacagcctggg

SEQ ID NO: 3567 - DNA, 23 bp, Homo sapiens
  source 1..23: mol_type = genomic DNA
cacaggggctaacgcagactggg

SEQ ID NO: 3568 - DNA, 23 bp, Homo sapiens
  source 1..23: mol_type = genomic DNA
cacaggggctaacgcagcctggg

SEQ ID NO: 3569 - DNA, 23 bp, Homo sapiens
  source 1..23: mol_type = genomic DNA
cacaggggctaatgcagcctggg

SEQ ID NO: 3570 - DNA, 23 bp, Homo sapiens
  source 1..23: mol_type = genomic DNA
cacagggtcccaggctgggatgg

SEQ ID NO: 3571 - DNA, 23 bp, Homo sapiens
  source 1..23: mol_type = genomic DNA
cacaggtcagcgtgggaagaggg

SEQ ID NO: 3572 - DNA, 23 bp, Homo sapiens
  source 1..23: mol_type = genomic DNA
cacatcatccagaggatgtacgg

SEQ ID NO: 3573 - DNA, 23 bp, Homo sapiens
  source 1..23: mol_type = genomic DNA
cacatcatccagaggatgtatgg

SEQ ID NO: 3574 - DNA, 23 bp, Homo sapiens
  source 1..23: mol_type = genomic DNA
cacatcatccaggtgatgtatgg

SEQ ID NO: 3575 - DNA, 23 bp, Homo sapiens
  source 1..23: mol_type = genomic DNA
cacatcctccagaggatgtatgg

SEQ ID NO: 3576 - DNA, 23 bp, Homo sapiens
  source 1..23: mol_type = genomic DNA
cacatcgtgggcatcattgctgg

SEQ ID NO: 3577 - DNA, 23 bp, Homo sapiens
  source 1..23: mol_type = genomic DNA
cacatgccatgtacagcatgagg

SEQ ID NO: 3578 - DNA, 23 bp, Homo sapiens
  source 1..23: mol_type = genomic DNA
cacatgggccatcccagcctggg

SEQ ID NO: 3579 - DNA, 23 bp, Homo sapiens
  source 1..23: mol_type = genomic DNA
cacatttctggaaacttctctgg

SEQ ID NO: 3580 - DNA, 23 bp, Homo sapiens
  source 1..23: mol_type = genomic DNA
caccaagcacaagtgggagacgg

SEQ ID NO: 3581 - DNA, 23 bp, Homo sapiens
  source 1..23: mol_type = genomic DNA
caccaagcacaagtgggaggcgg

SEQ ID NO: 3582 - DNA, 23 bp, Homo sapiens
  source 1..23: mol_type = genomic DNA
caccaagcgcaagtgggaggcgg

SEQ ID NO: 3583 - DNA, 23 bp, Homo sapiens
  source 1..23: mol_type = genomic DNA
caccagcccaggtctcggtcagg

SEQ ID NO: 3584 - DNA, 23 bp, Homo sapiens
  source 1..23: mol_type = genomic DNA
caccagcggatgcaggcacctgg

SEQ ID NO: 3585 - DNA, 23 bp, Homo sapiens
  source 1..23: mol_type = genomic DNA
cacccaatgggagtgagaactgg

SEQ ID NO: 3586 - DNA, 23 bp, Homo sapiens
  source 1..23: mol_type = genomic DNA
cacccaatgggagtgggaaatgg

SEQ ID NO: 3587 - DNA, 23 bp, Homo sapiens
  source 1..23: mol_type = genomic DNA
cacccaatgggagtgggaagtgg

SEQ ID NO: 3588 - DNA, 23 bp, Homo sapiens
  source 1..23: mol_type = genomic DNA
cacccaatgggagtgggaattgg

SEQ ID NO: 3589 - DNA, 23 bp, Homo sapiens
  source 1..23: mol_type = genomic DNA
cacccagcgcaagtgggagacgg

SEQ ID NO: 3590 - DNA, 23 bp, Homo sapiens
  source 1..23: mol_type = genomic DNA
cacccagcgcaagtgggaggcgg

SEQ ID NO: 3591 - DNA, 23 bp, Homo sapiens
  source 1..23: mol_type = genomic DNA
cacccagcgcaagttggaggcgg

SEQ ID NO: 3592 - DNA, 23 bp, Homo sapiens
  source 1..23: mol_type = genomic DNA
cacccagctcaagtgggaggcgg

SEQ ID NO: 3593 - DNA, 23 bp, Homo sapiens
  source 1..23: mol_type = genomic DNA
cacccgacacccaatgggagtgg

SEQ ID NO: 3594 - DNA, 23 bp, Homo sapiens
  source 1..23: mol_type = genomic DNA
cacccgcccaggtctgggtcagg

SEQ ID NO: 3595 - DNA, 23 bp, Homo sapiens
  source 1..23: mol_type = genomic DNA
cacccgccctggtctgggtcagg

SEQ ID NO: 3596 - DNA, 23 bp, Homo sapiens
  source 1..23: mol_type = genomic DNA
caccctccctctgctcctgaggg

SEQ ID NO: 3597 - DNA, 23 bp, Homo sapiens
  source 1..23: mol_type = genomic DNA
caccctccctctggtcctgaggg

SEQ ID NO: 3598 - DNA, 23 bp, Homo sapiens
  source 1..23: mol_type = genomic DNA
caccctgagatggagtaaggagg

SEQ ID NO: 3599 - DNA, 23 bp, Homo sapiens
  source 1..23: mol_type = genomic DNA
caccctgagatggggtaaggagg

SEQ ID NO: 3600 - DNA, 23 bp, Homo sapiens
  source 1..23: mol_type = genomic DNA
caccctgagctggggtaaggagg

SEQ ID NO: 3601 - DNA, 23 bp, Homo sapiens
  source 1..23: mol_type = genomic DNA
caccctgaggtgctgggccctgg

SEQ ID NO: 3602 - DNA, 23 bp, Homo sapiens
  source 1..23: mol_type = genomic DNA
caccggcccaggtctcgatcagg

SEQ ID NO: 3603 - DNA, 23 bp, Homo sapiens
  source 1..23: mol_type = genomic DNA
caccggcccaggtctcggtcagg

SEQ ID NO: 3604 - DNA, 23 bp, Homo sapiens
  source 1..23: mol_type = genomic DNA
caccggtccaggtctcgatcagg

SEQ ID NO: 3605 - DNA, 23 bp, Homo sapiens
  source 1..23: mol_type = genomic DNA
caccgtggatagagcaggagggg

SEQ ID NO: 3606 - DNA, 23 bp, Homo sapiens
  source 1..23: mol_type = genomic DNA
cacctccctgcgcggctccccgg

SEQ ID NO: 3607 - DNA, 23 bp, Homo sapiens
  source 1..23: mol_type = genomic DNA
cacctcgatggttgtggtgttgg

SEQ ID NO: 3608 - DNA, 23 bp, Homo sapiens
  source 1..23: mol_type = genomic DNA
cacctcgttcctctccgcagagg

SEQ ID NO: 3609 - DNA, 23 bp, Homo sapiens
  source 1..23: mol_type = genomic DNA
cacctgccatgtgcagcatgagg

SEQ ID NO: 3610 - DNA, 23 bp, Homo sapiens
  source 1..23: mol_type = genomic DNA
cacctgcccaggtctgggtcagg

SEQ ID NO: 3611 - DNA, 23 bp, Homo sapiens
  source 1..23: mol_type = genomic DNA
cacctgggccatcccagcctggg

SEQ ID NO: 3612 - DNA, 23 bp, Homo sapiens
  source 1..23: mol_type = genomic DNA
caccttcccctcctttcccaggg

SEQ ID NO: 3613 - DNA, 23 bp, Homo sapiens
  source 1..23: mol_type = genomic DNA
caccttgatgattatggtgttgg

SEQ ID NO: 3614 - DNA, 23 bp, Homo sapiens
  source 1..23: mol_type = genomic DNA
caccttgatggttgtggtgttgg

SEQ ID NO: 3615 - DNA, 23 bp, Homo sapiens
  source 1..23: mol_type = genomic DNA
caccttgattacagcggtgatgg

SEQ ID NO: 3616 - DNA, 23 bp, Homo sapiens
  source 1..23: mol_type = genomic DNA
caccttgattacggcagtgatgg

SEQ ID NO: 3617 - DNA, 23 bp, Homo sapiens
  source 1..23: mol_type = genomic DNA
caccttgattacggcggtgatgg

SEQ ID NO: 3618 - DNA, 23 bp, Homo sapiens
  source 1..23: mol_type = genomic DNA
caccttgattatggcggtgatgg

SEQ ID NO: 3619 - DNA, 23 bp, Homo sapiens
  source 1..23: mol_type = genomic DNA
caccttggtggttgtggtgttgg

SEQ ID NO: 3620 - DNA, 23 bp, Homo sapiens
  source 1..23: mol_type = genomic DNA
cacgagaagaagaggaaaatggg

SEQ ID NO: 3621 - DNA, 23 bp, Homo sapiens
  source 1..23: mol_type = genomic DNA
cacgagaagaggaggaaaatggg

SEQ ID NO: 3622 - DNA, 23 bp, Homo sapiens
  source 1..23: mol_type = genomic DNA
cacgaggaggggaggaaaatggg

SEQ ID NO: 3623 - DNA, 23 bp, Homo sapiens
  source 1..23: mol_type = genomic DNA
cacgatggggacggtggactggg

SEQ ID NO: 3624 - DNA, 23 bp, Homo sapiens
  source 1..23: mol_type = genomic DNA
cacgatggggacggtggattggg

SEQ ID NO: 3625 - DNA, 23 bp, Homo sapiens
  source 1..23: mol_type = genomic DNA
cacgatggggacggtgggctggg

SEQ ID NO: 3626 - DNA, 23 bp, Homo sapiens
  source 1..23: mol_type = genomic DNA
cacgatggggatggtggactggg

SEQ ID NO: 3627 - DNA, 23 bp, Homo sapiens
  source 1..23: mol_type = genomic DNA
cacgatggggatggtgggctggg

SEQ ID NO: 3628 - DNA, 23 bp, Homo sapiens
  source 1..23: mol_type = genomic DNA
cacgatgtggacggtgggctggg

SEQ ID NO: 3629 - DNA, 23 bp, Homo sapiens
  source 1..23: mol_type = genomic DNA
cacgcacaggccctccaggtagg

SEQ ID NO: 3630 - DNA, 23 bp, Homo sapiens
  source 1..23: mol_type = genomic DNA
cacgcaccggccctccaggtagg

SEQ ID NO: 3631 - DNA, 23 bp, Homo sapiens
  source 1..23: mol_type = genomic DNA
cacgcacgtgccatccaggtagg

SEQ ID NO: 3632 - DNA, 23 bp, Homo sapiens
  source 1..23: mol_type = genomic DNA
cacgcacgtgccctccaggtagg

SEQ ID NO: 3633 - DNA, 23 bp, Homo sapiens
  source 1..23: mol_type = genomic DNA
cacgcactcgccctccaggtagg

SEQ ID NO: 3634 - DNA, 23 bp, Homo sapiens
  source 1..23: mol_type = genomic DNA
cacgggcccaaggctgccgccgg

SEQ ID NO: 3635 - DNA, 23 bp, Homo sapiens
  source 1..23: mol_type = genomic DNA
cacgggcccaaggctgctgccgg

SEQ ID NO: 3636 - DNA, 23 bp, Homo sapiens
  source 1..23: mol_type = genomic DNA
cacgggtaccaggggccacgggg

SEQ ID NO: 3637 - DNA, 23 bp, Homo sapiens
  source 1..23: mol_type = genomic DNA
cacgggtaccgggggccacgggg

SEQ ID NO: 3638 - DNA, 23 bp, Homo sapiens
  source 1..23: mol_type = genomic DNA
cacggtcccaaggctgctgccgg

SEQ ID NO: 3639 - DNA, 23 bp, Homo sapiens
  source 1..23: mol_type = genomic DNA
cacgtgccatatgcagcacgagg

SEQ ID NO: 3640 - DNA, 23 bp, Homo sapiens
  source 1..23: mol_type = genomic DNA
cacgtgccatgtgcagcacgagg

SEQ ID NO: 3641 - DNA, 23 bp, Homo sapiens
  source 1..23: mol_type = genomic DNA
cacgtgccatgttcagcacgagg

SEQ ID NO: 3642 - DNA, 23 bp, Homo sapiens
  source 1..23: mol_type = genomic DNA
cacgtgggccatcccagcctggg

SEQ ID NO: 3643 - DNA, 23 bp, Homo sapiens
  source 1..23: mol_type = genomic DNA
cactacaaccagagcgaggccgg

SEQ ID NO: 3644 - DNA, 23 bp, Homo sapiens
  source 1..23: mol_type = genomic DNA
cactcggtcaatctgtgagtggg

SEQ ID NO: 3645 - DNA, 23 bp, Homo sapiens
  source 1..23: mol_type = genomic DNA
cactcggtcagtctgtgactggg

SEQ ID NO: 3646 - DNA, 23 bp, Homo sapiens
  source 1..23: mol_type = genomic DNA
cactcggtcagtctgtgagtggg

SEQ ID NO: 3647 - DNA, 23 bp, Homo sapiens
  source 1..23: mol_type = genomic DNA
cactcggtgagtctgtgagtggg

SEQ ID NO: 3648 - DNA, 23 bp, Homo sapiens
  source 1..23: mol_type = genomic DNA
cactctgagatgctgggccctgg

SEQ ID NO: 3649 - DNA, 23 bp, Homo sapiens
  source 1..23: mol_type = genomic DNA
cactgacctggcagcgggatggg

SEQ ID NO: 3650 - DNA, 23 bp, Homo sapiens
  source 1..23: mol_type = genomic DNA
cactgacctggcagtgggatggg

SEQ ID NO: 3651 - DNA, 23 bp, Homo sapiens
  source 1..23: mol_type = genomic DNA
cactgagggttccaagacccagg

SEQ ID NO: 3652 - DNA, 23 bp, Homo sapiens
  source 1..23: mol_type = genomic DNA
cactggagggtgtgagaccctgg

SEQ ID NO: 3653 - DNA, 23 bp, Homo sapiens
  source 1..23: mol_type = genomic DNA
cactgggagtttcaagccccagg

SEQ ID NO: 3654 - DNA, 23 bp, Homo sapiens
  source 1..23: mol_type = genomic DNA
cactggggaggcgccgcgttggg

SEQ ID NO: 3655 - DNA, 23 bp, Homo sapiens
  source 1..23: mol_type = genomic DNA
cactgggggtttcaagccccagg

SEQ ID NO: 3656 - DNA, 23 bp, Homo sapiens
  source 1..23: mol_type = genomic DNA
cacttctcccaacctgcgtcggg

SEQ ID NO: 3657 - DNA, 23 bp, Homo sapiens
  source 1..23: mol_type = genomic DNA
cacttgtaaaggtgagattctgg

SEQ ID NO: 3658 - DNA, 23 bp, Homo sapiens
  source 1..23: mol_type = genomic DNA
cactttacctccactcagatcgg

SEQ ID NO: 3659 - DNA, 23 bp, Homo sapiens
  source 1..23: mol_type = genomic DNA
cagaaacgatgcccaagttgggg

SEQ ID NO: 3660 - DNA, 23 bp, Homo sapiens
  source 1..23: mol_type = genomic DNA
cagacacctggagaacgggaagg

SEQ ID NO: 3661 - DNA, 23 bp, Homo sapiens
  source 1..23: mol_type = genomic DNA
cagacactttgcatctctcttgg

SEQ ID NO: 3662 - DNA, 23 bp, Homo sapiens
  source 1..23: mol_type = genomic DNA
cagaccagggcgggtgagtgcgg

SEQ ID NO: 3663 - DNA, 23 bp, Homo sapiens
  source 1..23: mol_type = genomic DNA
cagacctgggcaggtgagtgcgg

SEQ ID NO: 3664 - DNA, 23 bp, Homo sapiens
  source 1..23: mol_type = genomic DNA
cagacctgggcgggtgagtgcgg

SEQ ID NO: 3665 - DNA, 23 bp, Homo sapiens
  source 1..23: mol_type = genomic DNA
cagacgccagcctggacacaggg

SEQ ID NO: 3666 - DNA, 23 bp, Homo sapiens
  source 1..23: mol_type = genomic DNA
cagactaaccgagcgaacctggg

SEQ ID NO: 3667 - DNA, 23 bp, Homo sapiens
  source 1..23: mol_type = genomic DNA
cagactcaccgagtggacctggg

SEQ ID NO: 3668 - DNA, 23 bp, Homo sapiens
  source 1..23: mol_type = genomic DNA
cagactgaccgagagaacctggg

SEQ ID NO: 3669 - DNA, 23 bp, Homo sapiens
  source 1..23: mol_type = genomic DNA
cagactgaccgagcgaacctggg

SEQ ID NO: 3670 - DNA, 23 bp, Homo sapiens
  source 1..23: mol_type = genomic DNA
cagactgaccgagtggacctggg

SEQ ID NO: 3671 - DNA, 23 bp, Homo sapiens
  source 1..23: mol_type = genomic DNA
cagagcccctcaccctgagatgg

SEQ ID NO: 3672 - DNA, 23 bp, Homo sapiens
  source 1..23: mol_type = genomic DNA
cagagggagaaaagaaactgcgg

SEQ ID NO: 3673 - DNA, 23 bp, Homo sapiens
  source 1..23: mol_type = genomic DNA
cagagtaagtgctagcacacagg

SEQ ID NO: 3674 - DNA, 23 bp, Homo sapiens
  source 1..23: mol_type = genomic DNA
cagagtaagtgctggcacacagg

SEQ ID NO: 3675 - DNA, 23 bp, Homo sapiens
  source 1..23: mol_type = genomic DNA
cagatacctgaagaacgggaagg

SEQ ID NO: 3676 - DNA, 23 bp, Homo sapiens
  source 1..23: mol_type = genomic DNA
cagatacctgaagaatgggaagg

SEQ ID NO: 3677 - DNA, 23 bp, Homo sapiens
  source 1..23: mol_type = genomic DNA
cagatacctggagaacgggaagg

SEQ ID NO: 3678 - DNA, 23 bp, Homo sapiens
  source 1..23: mol_type = genomic DNA
cagattctccccagaccccgagg

SEQ ID NO: 3679 - DNA, 23 bp, Homo sapiens
  source 1..23: mol_type = genomic DNA
cagattctccccagacgccgagg

SEQ ID NO: 3680 - DNA, 23 bp, Homo sapiens
  source 1..23: mol_type = genomic DNA
cagattgaccgagtggacctggg

SEQ ID NO: 3681 - DNA, 23 bp, Homo sapiens
  source 1..23: mol_type = genomic DNA
cagatttatcaccttgattacgg

SEQ ID NO: 3682 - DNA, 23 bp, Homo sapiens
  source 1..23: mol_type = genomic DNA
cagatttatcaccttgattatgg

SEQ ID NO: 3683 - DNA, 23 bp, Homo sapiens
  source 1..23: mol_type = genomic DNA
cagcaacaatgcccacgatgggg

SEQ ID NO: 3684 - DNA, 23 bp, Homo sapiens
  source 1..23: mol_type = genomic DNA
cagcaacgatgcccacgatgggg

SEQ ID NO: 3685 - DNA, 23 bp, Homo sapiens
  source 1..23: mol_type = genomic DNA
cagcaacgatgcccatgatgggg

SEQ ID NO: 3686 - DNA, 23 bp, Homo sapiens
  source 1..23: mol_type = genomic DNA
cagcaaggatgcccacgatgggg

SEQ ID NO: 3687 - DNA, 23 bp, Homo sapiens
  source 1..23: mol_type = genomic DNA
cagcaatgatgcccacaatgggg

SEQ ID NO: 3688 - DNA, 23 bp, Homo sapiens
  source 1..23: mol_type = genomic DNA
cagcaatgatgcccacgatgggg

SEQ ID NO: 3689 - DNA, 23 bp, Homo sapiens
  source 1..23: mol_type = genomic DNA
cagcaatgatgcccacgatgtgg

SEQ ID NO: 3690 - DNA, 23 bp, Homo sapiens
  source 1..23: mol_type = genomic DNA
cagcagagagcctacctggaggg

SEQ ID NO: 3691 - DNA, 23 bp, Homo sapiens
  source 1..23: mol_type = genomic DNA
cagcagagagcctacctggatgg

SEQ ID NO: 3692 - DNA, 23 bp, Homo sapiens
  source 1..23: mol_type = genomic DNA
cagcagcgaccacagctcctagg

SEQ ID NO: 3693 - DNA, 23 bp, Homo sapiens
  source 1..23: mol_type = genomic DNA
cagccattttgcatctgtcatgg

SEQ ID NO: 3694 - DNA, 23 bp, Homo sapiens
  source 1..23: mol_type = genomic DNA
cagcccaccatccccaacttggg

SEQ ID NO: 3695 - DNA, 23 bp, Homo sapiens
  source 1..23: mol_type = genomic DNA
cagcccaccatccccatcatggg

SEQ ID NO: 3696 - DNA, 23 bp, Homo sapiens
  source 1..23: mol_type = genomic DNA
cagcccaccatccccatcgtggg

SEQ ID NO: 3697 - DNA, 23 bp, Homo sapiens
  source 1..23: mol_type = genomic DNA
cagcccaccatccccattgtggg

SEQ ID NO: 3698 - DNA, 23 bp, Homo sapiens
  source 1..23: mol_type = genomic DNA
cagcccaccgtccacatcgtggg

SEQ ID NO: 3699 - DNA, 23 bp, Homo sapiens
  source 1..23: mol_type = genomic DNA
cagcccaccgtccccatcgtggg

SEQ ID NO: 3700 - DNA, 23 bp, Homo sapiens
  source 1..23: mol_type = genomic DNA
cagccccacctctctgcaacagg

SEQ ID NO: 3701 - DNA, 23 bp, Homo sapiens
  source 1..23: mol_type = genomic DNA
cagccccacctctctggaacagg

SEQ ID NO: 3702 - DNA, 23 bp, Homo sapiens
  source 1..23: mol_type = genomic DNA
cagcctaccatccccatcatggg

SEQ ID NO: 3703 - DNA, 23 bp, Homo sapiens
  source 1..23: mol_type = genomic DNA
cagcctggacacaggcacctggg

SEQ ID NO: 3704 - DNA, 23 bp, Homo sapiens
  source 1..23: mol_type = genomic DNA
cagcctggacacagggacctggg

SEQ ID NO: 3705 - DNA, 23 bp, Homo sapiens
  source 1..23: mol_type = genomic DNA
cagcctggacgcaggcacctggg

SEQ ID NO: 3706 - DNA, 23 bp, Homo sapiens
  source 1..23: mol_type = genomic DNA
cagcggagagcctacctggaggg

SEQ ID NO: 3707 - DNA, 23 bp, Homo sapiens
  source 1..23: mol_type = genomic DNA
cagcggagagtctacctggaggg

SEQ ID NO: 3708 - DNA, 23 bp, Homo sapiens
  source 1..23: mol_type = genomic DNA
cagctactacaaccagagcgagg

SEQ ID NO: 3709 - DNA, 23 bp, Homo sapiens
  source 1..23: mol_type = genomic DNA
cagctgagaacctacctggaggg

SEQ ID NO: 3710 - DNA, 23 bp, Homo sapiens
  source 1..23: mol_type = genomic DNA
cagctgagagcctacctggaggg

SEQ ID NO: 3711 - DNA, 23 bp, Homo sapiens
  source 1..23: mol_type = genomic DNA
caggaagaaggacccgacgcagg

SEQ ID NO: 3712 - DNA, 23 bp, Homo sapiens
  source 1..23: mol_type = genomic DNA
caggaagaaggacccgtcgcagg

SEQ ID NO: 3713 - DNA, 23 bp, Homo sapiens
  source 1..23: mol_type = genomic DNA
caggaagaaggaccctacatagg

SEQ ID NO: 3714 - DNA, 23 bp, Homo sapiens
  source 1..23: mol_type = genomic DNA
caggaagagtcagaacattcagg

SEQ ID NO: 3715 - DNA, 23 bp, Homo sapiens
  source 1..23: mol_type = genomic DNA
caggaagagtcagatcattcagg

SEQ ID NO: 3716 - DNA, 23 bp, Homo sapiens
  source 1..23: mol_type = genomic DNA
caggacacctgggatggggaagg

SEQ ID NO: 3717 - DNA, 23 bp, Homo sapiens
  source 1..23: mol_type = genomic DNA
caggacacctggggtagggaagg

SEQ ID NO: 3718 - DNA, 23 bp, Homo sapiens
  source 1..23: mol_type = genomic DNA
caggacacctggggtggggaagg

SEQ ID NO: 3719 - DNA, 23 bp, Homo sapiens
  source 1..23: mol_type = genomic DNA
caggacacctggtgtggggaagg

SEQ ID NO: 3720 - DNA, 23 bp, Homo sapiens
  source 1..23: mol_type = genomic DNA
caggacagagcctacctggaggg

SEQ ID NO: 3721 - DNA, 23 bp, Homo sapiens
  source 1..23: mol_type = genomic DNA
caggacccgggaagccgcgccgg

SEQ ID NO: 3722 - DNA, 23 bp, Homo sapiens
  source 1..23: mol_type = genomic DNA
caggacccggggagccgcgcagg

SEQ ID NO: 3723 - DNA, 23 bp, Homo sapiens
  source 1..23: mol_type = genomic DNA
caggacccggggagccgcgccgg

SEQ ID NO: 3724 - DNA, 23 bp, Homo sapiens
  source 1..23: mol_type = genomic DNA
caggacccggggagcggcgcagg

SEQ ID NO: 3725 - DNA, 23 bp, Homo sapiens
  source 1..23: mol_type = genomic DNA
caggacccgggtagccgcgccgg

SEQ ID NO: 3726 - DNA, 23 bp, Homo sapiens
  source 1..23: mol_type = genomic DNA
caggaccgggggagccgcgccgg

SEQ ID NO: 3727 - DNA, 23 bp, Homo sapiens
  source 1..23: mol_type = genomic DNA
caggacctgaggagccgcgccgg

SEQ ID NO: 3728 - DNA, 23 bp, Homo sapiens
  source 1..23: mol_type = genomic DNA
caggacgaagtcccaggccccgg

SEQ ID NO: 3729 - DNA, 23 bp, Homo sapiens
  source 1..23: mol_type = genomic DNA
caggacgaagtcccaggtcccgg

SEQ ID NO: 3730 - DNA, 23 bp, Homo sapiens
  source 1..23: mol_type = genomic DNA
caggacgaagtcccatgtcccgg

SEQ ID NO: 3731 - DNA, 23 bp, Homo sapiens
  source 1..23: mol_type = genomic DNA
caggaggattcctctccctcagg

SEQ ID NO: 3732 - DNA, 23 bp, Homo sapiens
  source 1..23: mol_type = genomic DNA
caggatgaaggaccctacgtagg

SEQ ID NO: 3733 - DNA, 23 bp, Homo sapiens
  source 1..23: mol_type = genomic DNA
caggcattttgcatctgtaatgg

SEQ ID NO: 3734 - DNA, 23 bp, Homo sapiens
  source 1..23: mol_type = genomic DNA
caggcattttgcatctgtcatgg

SEQ ID NO: 3735 - DNA, 23 bp, Homo sapiens
  source 1..23: mol_type = genomic DNA
caggccccgaaggcggtatatgg

SEQ ID NO: 3736 - DNA, 23 bp, Homo sapiens
  source 1..23: mol_type = genomic DNA
caggccccgaaggcggtgtatgg

SEQ ID NO: 3737 - DNA, 23 bp, Homo sapiens
  source 1..23: mol_type = genomic DNA
caggcgctttgcatctctcatgg

SEQ ID NO: 3738 - DNA, 23 bp, Homo sapiens
  source 1..23: mol_type = genomic DNA
caggcgctttgcatctttcatgg

SEQ ID NO: 3739 - DNA, 23 bp, Homo sapiens
  source 1..23: mol_type = genomic DNA
caggcgggggcgcaggacccggg

SEQ ID NO: 3740 - DNA, 23 bp, Homo sapiens
  source 1..23: mol_type = genomic DNA
caggcgggggctcaggacccggg

SEQ ID NO: 3741 - DNA, 23 bp, Homo sapiens
  source 1..23: mol_type = genomic DNA
caggctgcaagtaagtatgaagg

SEQ ID NO: 3742 - DNA, 23 bp, Homo sapiens
  source 1..23: mol_type = genomic DNA
caggctgcgtgtaagtgatgggg

SEQ ID NO: 3743 - DNA, 23 bp, Homo sapiens
  source 1..23: mol_type = genomic DNA
caggctgcgtgtaagtggtgggg

SEQ ID NO: 3744 - DNA, 23 bp, Homo sapiens
  source 1..23: mol_type = genomic DNA
cagggcaggatcaggaaacacgg

SEQ ID NO: 3745 - DNA, 23 bp, Homo sapiens
  source 1..23: mol_type = genomic DNA
cagggcaggatcaggaaacatgg

SEQ ID NO: 3746 - DNA, 23 bp, Homo sapiens
  source 1..23: mol_type = genomic DNA
cagggcccagcacctcagagtgg

SEQ ID NO: 3747 - DNA, 23 bp, Homo sapiens
  source 1..23: mol_type = genomic DNA
cagggcccagcacctcagggtgg

SEQ ID NO: 3748 - DNA, 23 bp, Homo sapiens
  source 1..23: mol_type = genomic DNA
cagggcccagcatctcagagtgg

SEQ ID NO: 3749 - DNA, 23 bp, Homo sapiens
  source 1..23: mol_type = genomic DNA
cagggcggggcggggctcggggg

SEQ ID NO: 3750 - DNA, 23 bp, Homo sapiens
  source 1..23: mol_type = genomic DNA
cagggtacttcaagtcacaaagg

SEQ ID NO: 3751 - DNA, 23 bp, Homo sapiens
  source 1..23: mol_type = genomic DNA
cagggtctcacaccatccagagg

SEQ ID NO: 3752 - DNA, 23 bp, Homo sapiens
  source 1..23: mol_type = genomic DNA
cagggtctcacaccctccagagg

SEQ ID NO: 3753 - DNA, 23 bp, Homo sapiens
  source 1..23: mol_type = genomic DNA
cagggtctcacaccctccagtgg

SEQ ID NO: 3754 - DNA, 23 bp, Homo sapiens
  source 1..23: mol_type = genomic DNA
cagggtctcacaccttccagagg

SEQ ID NO: 3755 - DNA, 23 bp, Homo sapiens
  source 1..23: mol_type = genomic DNA
cagggtctcacacttggcagagg

SEQ ID NO: 3756 - DNA, 23 bp, Homo sapiens
  source 1..23: mol_type = genomic DNA
cagggtctcacatcatccagagg

SEQ ID NO: 3757 - DNA, 23 bp, Homo sapiens
  source 1..23: mol_type = genomic DNA
cagggtctcacatcctccagagg

SEQ ID NO: 3758 - DNA, 23 bp, Homo sapiens
  source 1..23: mol_type = genomic DNA
cagggttcttcaagtcacaaagg

SEQ ID NO: 3759 - DNA, 23 bp, Homo sapiens
  source 1..23: mol_type = genomic DNA
caggtcagggctgaggcttgggg

SEQ ID NO: 3760 - DNA, 23 bp, Homo sapiens
  source 1..23: mol_type = genomic DNA
caggtcagtgtgatctccacagg

SEQ ID NO: 3761 - DNA, 23 bp, Homo sapiens
  source 1..23: mol_type = genomic DNA
caggtcagtgtgatctccccagg

SEQ ID NO: 3762 - DNA, 23 bp, Homo sapiens
  source 1..23: mol_type = genomic DNA
caggtcagtgtgatctccgcagg

SEQ ID NO: 3763 - DNA, 23 bp, Homo sapiens
  source 1..23: mol_type = genomic DNA
caggtcagtgtgatctccgtagg

SEQ ID NO: 3764 - DNA, 23 bp, Homo sapiens
  source 1..23: mol_type = genomic DNA
caggtcagtgtgatctctgcagg

SEQ ID NO: 3765 - DNA, 23 bp, Homo sapiens
  source 1..23: mol_type = genomic DNA
caggtgagtgcggggtcgggagg

SEQ ID NO: 3766 - DNA, 23 bp, Homo sapiens
  source 1..23: mol_type = genomic DNA
caggtggggtgaagggatgaagg

SEQ ID NO: 3767 - DNA, 23 bp, Homo sapiens
  source 1..23: mol_type = genomic DNA
caggtggggtgaaggggtgaagg

SEQ ID NO: 3768 - DNA, 23 bp, Homo sapiens
  source 1..23: mol_type = genomic DNA
caggtgtcccgtccattctcagg

SEQ ID NO: 3769 - DNA, 23 bp, Homo sapiens
  source 1..23: mol_type = genomic DNA
caggtgtcctgcccattctcagg

SEQ ID NO: 3770 - DNA, 23 bp, Homo sapiens
  source 1..23: mol_type = genomic DNA
caggtgtcctgtccattctcagg

SEQ ID NO: 3771 - DNA, 23 bp, Homo sapiens
  source 1..23: mol_type = genomic DNA
caggtgtcctgtccgttctcagg

SEQ ID NO: 3772 - DNA, 23 bp, Homo sapiens
  source 1..23: mol_type = genomic DNA
caggttctcacaccatccagagg

SEQ ID NO: 3773 - DNA, 23 bp, Homo sapiens
  source 1..23: mol_type = genomic DNA
caggttctcacaccctccagagg

SEQ ID NO: 3774 - DNA, 23 bp, Homo sapiens
  source 1..23: mol_type = genomic DNA
caggttctcacaccgtccagagg

SEQ ID NO: 3775 - DNA, 23 bp, Homo sapiens
  source 1..23: mol_type = genomic DNA
caggttggtcggggcggggcggg

SEQ ID NO: 3776 - DNA, 23 bp, Homo sapiens
  source 1..23: mol_type = genomic DNA
cagtcacaagtcacaggggaagg

SEQ ID NO: 3777 - DNA, 23 bp, Homo sapiens
  source 1..23: mol_type = genomic DNA
cagtccaccatccccatcgtggg

SEQ ID NO: 3778 - DNA, 23 bp, Homo sapiens
  source 1..23: mol_type = genomic DNA
cagtccaccgtccccatcgtggg

SEQ ID NO: 3779 - DNA, 23 bp, Homo sapiens
  source 1..23: mol_type = genomic DNA
cagtccctagaatactgatcagg

SEQ ID NO: 3780 - DNA, 23 bp, Homo sapiens
  source 1..23: mol_type = genomic DNA
cagtccctaggatagtgatcagg

SEQ ID NO: 3781 - DNA, 23 bp, Homo sapiens
  source 1..23: mol_type = genomic DNA
cagtccctggaatactgatcagg

SEQ ID NO: 3782 - DNA, 23 bp, Homo sapiens
  source 1..23: mol_type = genomic DNA
cagtgagtgaccccggcccgggg

SEQ ID NO: 3783 - DNA, 23 bp, Homo sapiens
  source 1..23: mol_type = genomic DNA
cagtggacacagctgtgctatgg

SEQ ID NO: 3784 - DNA, 23 bp, Homo sapiens
  source 1..23: mol_type = genomic DNA
cagtggacacgggggtgggctgg

SEQ ID NO: 3785 - DNA, 23 bp, Homo sapiens
  source 1..23: mol_type = genomic DNA
cagtggacgcagctgtgctatgg

SEQ ID NO: 3786 - DNA, 23 bp, Homo sapiens
  source 1..23: mol_type = genomic DNA
cagtggagagcctacctggaggg

SEQ ID NO: 3787 - DNA, 23 bp, Homo sapiens
  source 1..23: mol_type = genomic DNA
cagtggccctgaccgagacctgg

SEQ ID NO: 3788 - DNA, 23 bp, Homo sapiens
  source 1..23: mol_type = genomic DNA
cagtggtcaaagtggtcaaaggg

SEQ ID NO: 3789 - DNA, 23 bp, Homo sapiens
  source 1..23: mol_type = genomic DNA
cagttgagagcctacctggaggg

SEQ ID NO: 3790 - DNA, 23 bp, Homo sapiens
  source 1..23: mol_type = genomic DNA
cagttgagagcctacctggatgg

SEQ ID NO: 3791 - DNA, 23 bp, Homo sapiens
  source 1..23: mol_type = genomic DNA
cataaccagtacgcctacgacgg

SEQ ID NO: 3792 - DNA, 23 bp, Homo sapiens
  source 1..23: mol_type = genomic DNA
cataaccagttagcctacgacgg

SEQ ID NO: 3793 - DNA, 23 bp, Homo sapiens
  source 1..23: mol_type = genomic DNA
cataaccagttcgcctacgacgg

SEQ ID NO: 3794 - DNA, 23 bp, Homo sapiens
  source 1..23: mol_type = genomic DNA
catcctggatactcacgacgcgg

SEQ ID NO: 3795 - DNA, 23 bp, Homo sapiens
  source 1..23: mol_type = genomic DNA
catctcagggtgaggggctccgg

SEQ ID NO: 3796 - DNA, 23 bp, Homo sapiens
  source 1..23: mol_type = genomic DNA
catctcagggtgaggggctcggg

SEQ ID NO: 3797 - DNA, 23 bp, Homo sapiens
  source 1..23: mol_type = genomic DNA
catctcagggtgaggggctctgg

SEQ ID NO: 3798 - DNA, 23 bp, Homo sapiens
  source 1..23: mol_type = genomic DNA
catctcagggtgaggggcttcgg

SEQ ID NO: 3799 - DNA, 23 bp, Homo sapiens
  source 1..23: mol_type = genomic DNA
catctcagggtgaggggcttggg

SEQ ID NO: 3800 - DNA, 23 bp, Homo sapiens
  source 1..23: mol_type = genomic DNA
catctcagggtgaggggctttgg

SEQ ID NO: 3801 - DNA, 23 bp, Homo sapiens
  source 1..23: mol_type = genomic DNA
catctctcataggacaccctagg

SEQ ID NO: 3802 - DNA, 23 bp, Homo sapiens
  source 1..23: mol_type = genomic DNA
catctctcatggcacaccctagg

SEQ ID NO: 3803 - DNA, 23 bp, Homo sapiens
  source 1..23: mol_type = genomic DNA
catctctcatgggacaccctagg

SEQ ID NO: 3804 - DNA, 23 bp, Homo sapiens
  source 1..23: mol_type = genomic DNA
catctttcatgggacaccctagg

SEQ ID NO: 3805 - DNA, 23 bp, Homo sapiens
  source 1..23: mol_type = genomic DNA
catgaccagtacgcctacgacgg

SEQ ID NO: 3806 - DNA, 23 bp, Homo sapiens
  source 1..23: mol_type = genomic DNA
catgaccagtccgcctacgacgg

SEQ ID NO: 3807 - DNA, 23 bp, Homo sapiens
  source 1..23: mol_type = genomic DNA
catgaccagttagcctacgacgg

SEQ ID NO: 3808 - DNA, 23 bp, Homo sapiens
  source 1..23: mol_type = genomic DNA
catgaccagttcgcctacgacgg

SEQ ID NO: 3809 - DNA, 23 bp, Homo sapiens
  source 1..23: mol_type = genomic DNA
catgatggggatggtaggctggg

SEQ ID NO: 3810 - DNA, 23 bp, Homo sapiens
  source 1..23: mol_type = genomic DNA
catgatggggatggtgggctggg

SEQ ID NO: 3811 - DNA, 23 bp, Homo sapiens
  source 1..23: mol_type = genomic DNA
catgccatgtacagcatgagggg

SEQ ID NO: 3812 - DNA, 23 bp, Homo sapiens
  source 1..23: mol_type = genomic DNA
catgctgcttcccagtaatgagg

SEQ ID NO: 3813 - DNA, 23 bp, Homo sapiens
  source 1..23: mol_type = genomic DNA
catgggcatcgttgctggcctgg

SEQ ID NO: 3814 - DNA, 23 bp, Homo sapiens
  source 1..23: mol_type = genomic DNA
catggtcagagacgagatggtgg

SEQ ID NO: 3815 - DNA, 23 bp, Homo sapiens
  source 1..23: mol_type = genomic DNA
catggtcagagacgggatggtgg

SEQ ID NO: 3816 - DNA, 23 bp, Homo sapiens
  source 1..23: mol_type = genomic DNA
catggtcagagacggggtggtgg

SEQ ID NO: 3817 - DNA, 23 bp, Homo sapiens
  source 1..23: mol_type = genomic DNA
catggtcagagagggggtggtgg

SEQ ID NO: 3818 - DNA, 23 bp, Homo sapiens
  source 1..23: mol_type = genomic DNA
catggtcagagatgggatggtgg

SEQ ID NO: 3819 - DNA, 23 bp, Homo sapiens
  source 1..23: mol_type = genomic DNA
catggtcagagatggggtggtgg

SEQ ID NO: 3820 - DNA, 23 bp, Homo sapiens
  source 1..23: mol_type = genomic DNA
catgtaggcataatgtgaggagg

SEQ ID NO: 3821 - DNA, 23 bp, Homo sapiens
  source 1..23: mol_type = genomic DNA
catgtcccggcccggccgcgggg

SEQ ID NO: 3822 - DNA, 23 bp, Homo sapiens
  source 1..23: mol_type = genomic DNA
catgtcccggcctggccgcgggg

SEQ ID NO: 3823 - DNA, 23 bp, Homo sapiens
  source 1..23: mol_type = genomic DNA
catgtgaccagcctgagaatggg

SEQ ID NO: 3824 - DNA, 23 bp, Homo sapiens
  source 1..23: mol_type = genomic DNA
catgtttcctgatcccgccctgg

SEQ ID NO: 3825 - DNA, 23 bp, Homo sapiens
  source 1..23: mol_type = genomic DNA
catgtttcctgatcctgccctgg

SEQ ID NO: 3826 - DNA, 23 bp, Homo sapiens
  source 1..23: mol_type = genomic DNA
cattctcaggatagtcacatggg

SEQ ID NO: 3827 - DNA, 23 bp, Homo sapiens
  source 1..23: mol_type = genomic DNA
cattctcaggatggtcacatggg

SEQ ID NO: 3828 - DNA, 23 bp, Homo sapiens
  source 1..23: mol_type = genomic DNA
cattctcaggctggtcacatggg

SEQ ID NO: 3829 - DNA, 23 bp, Homo sapiens
  source 1..23: mol_type = genomic DNA
cattggggaggcgcagcattggg

SEQ ID NO: 3830 - DNA, 23 bp, Homo sapiens
  source 1..23: mol_type = genomic DNA
cattggggaggcgcagcgttggg

SEQ ID NO: 3831 - DNA, 23 bp, Homo sapiens
  source 1..23: mol_type = genomic DNA
cattggggaggcgccgcgttggg

SEQ ID NO: 3832 - DNA, 23 bp, Homo sapiens
  source 1..23: mol_type = genomic DNA
catttctggaaacttctctgagg

SEQ ID NO: 3833 - DNA, 23 bp, Homo sapiens
  source 1..23: mol_type = genomic DNA
catttctggaaacttctctgggg

SEQ ID NO: 3834 - DNA, 23 bp, Homo sapiens
  source 1..23: mol_type = genomic DNA
cattttcctcccctcctcgtggg

SEQ ID NO: 3835 - DNA, 23 bp, Homo sapiens
  source 1..23: mol_type = genomic DNA
cattttcctcctcttctcgtggg

SEQ ID NO: 3836 - DNA, 23 bp, Homo sapiens
  source 1..23: mol_type = genomic DNA
cattttcctcttcttctcgtggg

SEQ ID NO: 3837 - DNA, 23 bp, Homo sapiens
  source 1..23: mol_type = genomic DNA
cattttcctcttcttctcgttgg

SEQ ID NO: 3838 - DNA, 23 bp, Homo sapiens
  source 1..23: mol_type = genomic DNA
ccaagcccctcaccctgagatgg

SEQ ID NO: 3839 - DNA, 23 bp, Homo sapiens
  source 1..23: mol_type = genomic DNA
ccaagggccgtgtctgcactggg

SEQ ID NO: 3840 - DNA, 23 bp, Homo sapiens
  source 1..23: mol_type = genomic DNA
ccaagggccgtgtctgcattggg

SEQ ID NO: 3841 - DNA, 23 bp, Homo sapiens
  source 1..23: mol_type = genomic DNA
ccaagttggggatggtgggctgg

SEQ ID NO: 3842 - DNA, 23 bp, Homo sapiens
  source 1..23: mol_type = genomic DNA
ccaatccaccgtccccatcgtgg

SEQ ID NO: 3843 - DNA, 23 bp, Homo sapiens
  source 1..23: mol_type = genomic DNA
ccaatccatacaccgccttcggg

SEQ ID NO: 3844 - DNA, 23 bp, Homo sapiens
  source 1..23: mol_type = genomic DNA
ccaatccatataccgccttcggg

SEQ ID NO: 3845 - DNA, 23 bp, Homo sapiens
  source 1..23: mol_type = genomic DNA
ccaattgtctcccctccttgtgg

SEQ ID NO: 3846 - DNA, 23 bp, Homo sapiens
  source 1..23: mol_type = genomic DNA
ccacaactgctaggacagccagg

SEQ ID NO: 3847 - DNA, 23 bp, Homo sapiens
  source 1..23: mol_type = genomic DNA
ccacaaggaggggagacaattgg

SEQ ID NO: 3848 - DNA, 23 bp, Homo sapiens
  source 1..23: mol_type = genomic DNA
ccacaatggggatggtgggctgg

SEQ ID NO: 3849 - DNA, 23 bp, Homo sapiens
  source 1..23: mol_type = genomic DNA
ccacagctccaaggacagctagg

SEQ ID NO: 3850 - DNA, 23 bp, Homo sapiens
  source 1..23: mol_type = genomic DNA
ccacagctcctaggacagctagg

SEQ ID NO: 3851 - DNA, 23 bp, Homo sapiens
  source 1..23: mol_type = genomic DNA
ccaccacagacgcccacttctgg

SEQ ID NO: 3852 - DNA, 23 bp, Homo sapiens
  source 1..23: mol_type = genomic DNA
ccaccacagccacccacttctgg

SEQ ID NO: 3853 - DNA, 23 bp, Homo sapiens
  source 1..23: mol_type = genomic DNA
ccaccacagccgcccacttctgg

SEQ ID NO: 3854 - DNA, 23 bp, Homo sapiens
  source 1..23: mol_type = genomic DNA
ccaccacagctgcccacttctgg

SEQ ID NO: 3855 - DNA, 23 bp, Homo sapiens
  source 1..23: mol_type = genomic DNA
ccaccacagctgtccacttctgg

SEQ ID NO: 3856 - DNA, 23 bp, Homo sapiens
  source 1..23: mol_type = genomic DNA
ccaccccatctctgaccatgagg

SEQ ID NO: 3857 - DNA, 23 bp, Homo sapiens
  source 1..23: mol_type = genomic DNA
ccaccccctctctgaccatgagg

SEQ ID NO: 3858 - DNA, 23 bp, Homo sapiens
  source 1..23: mol_type = genomic DNA
ccaccccgtctctgaccatgagg

SEQ ID NO: 3859 - DNA, 23 bp, Homo sapiens
  source 1..23: mol_type = genomic DNA
ccacgagaagaagaggaaaatgg

SEQ ID NO: 3860 - DNA, 23 bp, Homo sapiens
  source 1..23: mol_type = genomic DNA
ccacgagaagaggaggaaaatgg

SEQ ID NO: 3861 - DNA, 23 bp, Homo sapiens
  source 1..23: mol_type = genomic DNA
ccacgaggaggggaggaaaatgg

SEQ ID NO: 3862 - DNA, 23 bp, Homo sapiens
  source 1..23: mol_type = genomic DNA
ccacgatggggacggtggactgg

SEQ ID NO: 3863 - DNA, 23 bp, Homo sapiens
  source 1..23: mol_type = genomic DNA
ccacgatggggacggtggattgg

SEQ ID NO: 3864 - DNA, 23 bp, Homo sapiens
  source 1..23: mol_type = genomic DNA
ccacgatggggacggtgggctgg

SEQ ID NO: 3865 - DNA, 23 bp, Homo sapiens
  source 1..23: mol_type = genomic DNA
ccacgatggggatggtggactgg

SEQ ID NO: 3866 - DNA, 23 bp, Homo sapiens
  source 1..23: mol_type = genomic DNA
ccacgatggggatggtgggctgg

SEQ ID NO: 3867 - DNA, 23 bp, Homo sapiens
  source 1..23: mol_type = genomic DNA
ccacgatgtggacggtgggctgg

SEQ ID NO: 3868 - DNA, 23 bp, Homo sapiens
  source 1..23: mol_type = genomic DNA
ccacgctgtctctgaccatgagg

SEQ ID NO: 3869 - DNA, 23 bp, Homo sapiens
  source 1..23: mol_type = genomic DNA
ccactcacagactcaccgagtgg

SEQ ID NO: 3870 - DNA, 23 bp, Homo sapiens
  source 1..23: mol_type = genomic DNA
ccactcacagactgaccgagtgg

SEQ ID NO: 3871 - DNA, 23 bp, Homo sapiens
  source 1..23: mol_type = genomic DNA
ccactcacagattgaccgagtgg

SEQ ID NO: 3872 - DNA, 23 bp, Homo sapiens
  source 1..23: mol_type = genomic DNA
ccactcggtcaatctgtgagtgg

SEQ ID NO: 3873 - DNA, 23 bp, Homo sapiens
  source 1..23: mol_type = genomic DNA
ccactcggtcagtctgtgactgg

SEQ ID NO: 3874 - DNA, 23 bp, Homo sapiens
  source 1..23: mol_type = genomic DNA
ccactcggtcagtctgtgagtgg

SEQ ID NO: 3875 - DNA, 23 bp, Homo sapiens
  source 1..23: mol_type = genomic DNA
ccactcggtgagtctgtgagtgg

SEQ ID NO: 3876 - DNA, 23 bp, Homo sapiens
  source 1..23: mol_type = genomic DNA
ccactgcagcagctgtggtcagg

SEQ ID NO: 3877 - DNA, 23 bp, Homo sapiens
  source 1..23: mol_type = genomic DNA
ccactgccccccagagcagcagg

SEQ ID NO: 3878 - DNA, 23 bp, Homo sapiens
  source 1..23: mol_type = genomic DNA
ccactgcggcagctgtggtcagg

SEQ ID NO: 3879 - DNA, 23 bp, Homo sapiens
  source 1..23: mol_type = genomic DNA
ccagaaacgatgcccaagttggg

SEQ ID NO: 3880 - DNA, 23 bp, Homo sapiens
  source 1..23: mol_type = genomic DNA
ccagaagtggacagctgtggtgg

SEQ ID NO: 3881 - DNA, 23 bp, Homo sapiens
  source 1..23: mol_type = genomic DNA
ccagaagtgggcagctgtgatgg

SEQ ID NO: 3882 - DNA, 23 bp, Homo sapiens
  source 1..23: mol_type = genomic DNA
ccagaagtgggcagctgtggtgg

SEQ ID NO: 3883 - DNA, 23 bp, Homo sapiens
  source 1..23: mol_type = genomic DNA
ccagaagtgggcggctgtggtgg

SEQ ID NO: 3884 - DNA, 23 bp, Homo sapiens
  source 1..23: mol_type = genomic DNA
ccagaagtgggcgtctgtggtgg

SEQ ID NO: 3885 - DNA, 23 bp, Homo sapiens
  source 1..23: mol_type = genomic DNA
ccagaagtgggtggctgtggtgg

SEQ ID NO: 3886 - DNA, 23 bp, Homo sapiens
  source 1..23: mol_type = genomic DNA
ccagacaccagcctggacacagg

SEQ ID NO: 3887 - DNA, 23 bp, Homo sapiens
  source 1..23: mol_type = genomic DNA
ccagacaccagcctggacgcagg

SEQ ID NO: 3888 - DNA, 23 bp, Homo sapiens
  source 1..23: mol_type = genomic DNA
ccagacgccagcctggacacagg

SEQ ID NO: 3889 - DNA, 23 bp, Homo sapiens
  source 1..23: mol_type = genomic DNA
ccagagcccccgagagtagcagg

SEQ ID NO: 3890 - DNA, 23 bp, Homo sapiens
  source 1..23: mol_type = genomic DNA
ccagcaacaatgcccacgatggg

SEQ ID NO: 3891 - DNA, 23 bp, Homo sapiens
  source 1..23: mol_type = genomic DNA
ccagcaacgatgcccacgatggg

SEQ ID NO: 3892 - DNA, 23 bp, Homo sapiens
  source 1..23: mol_type = genomic DNA
ccagcaacgatgcccatgatggg

SEQ ID NO: 3893 - DNA, 23 bp, Homo sapiens
  source 1..23: mol_type = genomic DNA
ccagcaaggatgcccacgatggg

SEQ ID NO: 3894 - DNA, 23 bp, Homo sapiens
  source 1..23: mol_type = genomic DNA
ccagcaatgatgcccacaatggg

SEQ ID NO: 3895 - DNA, 23 bp, Homo sapiens
  source 1..23: mol_type = genomic DNA
ccagcaatgatgcccacgatggg

SEQ ID NO: 3896 - DNA, 23 bp, Homo sapiens
  source 1..23: mol_type = genomic DNA
ccagcagtcacaagtcacagggg

SEQ ID NO: 3897 - DNA, 23 bp, Homo sapiens
  source 1..23: mol_type = genomic DNA
ccagccagcaacagtgcccaggg

SEQ ID NO: 3898 - DNA, 23 bp, Homo sapiens
  source 1..23: mol_type = genomic DNA
ccagccagcgacagtgcccaggg

SEQ ID NO: 3899 - DNA, 23 bp, Homo sapiens
  source 1..23: mol_type = genomic DNA
ccagcccaccatccccaacttgg

SEQ ID NO: 3900 - DNA, 23 bp, Homo sapiens
  source 1..23: mol_type = genomic DNA
ccagcccaccatccccatcatgg

SEQ ID NO: 3901 - DNA, 23 bp, Homo sapiens
  source 1..23: mol_type = genomic DNA
ccagcccaccatccccatcgtgg

SEQ ID NO: 3902 - DNA, 23 bp, Homo sapiens
  source 1..23: mol_type = genomic DNA
ccagcccaccatccccattgtgg

SEQ ID NO: 3903 - DNA, 23 bp, Homo sapiens
  source 1..23: mol_type = genomic DNA
ccagcccaccgtccacatcgtgg

SEQ ID NO: 3904 - DNA, 23 bp, Homo sapiens
  source 1..23: mol_type = genomic DNA
ccagcccaccgtccccatcgtgg

SEQ ID NO: 3905 - DNA, 23 bp, Homo sapiens
  source 1..23: mol_type = genomic DNA
ccagccccgaccaacccgcgggg

SEQ ID NO: 3906 - DNA, 23 bp, Homo sapiens
  source 1..23: mol_type = genomic DNA
ccagccccgaccaacccgggggg

SEQ ID NO: 3907 - DNA, 23 bp, Homo sapiens
  source 1..23: mol_type = genomic DNA
ccagcctaccatccccatcatgg

SEQ ID NO: 3908 - DNA, 23 bp, Homo sapiens
  source 1..23: mol_type = genomic DNA
ccagcctggacacaggcacctgg

SEQ ID NO: 3909 - DNA, 23 bp, Homo sapiens
  source 1..23: mol_type = genomic DNA
ccagcctggacacagggacctgg

SEQ ID NO: 3910 - DNA, 23 bp, Homo sapiens
  source 1..23: mol_type = genomic DNA
ccagcctggacgcaggcacctgg

SEQ ID NO: 3911 - DNA, 23 bp, Homo sapiens
  source 1..23: mol_type = genomic DNA
ccaggacagccaggacagccagg

SEQ ID NO: 3912 - DNA, 23 bp, Homo sapiens
  source 1..23: mol_type = genomic DNA
ccaggacagccaggacagctggg

SEQ ID NO: 3913 - DNA, 23 bp, Homo sapiens
  source 1..23: mol_type = genomic DNA
ccaggacgcctacgacggcaagg

SEQ ID NO: 3914 - DNA, 23 bp, Homo sapiens
  source 1..23: mol_type = genomic DNA
ccaggactcccgagagcagcagg

SEQ ID NO: 3915 - DNA, 23 bp, Homo sapiens
  source 1..23: mol_type = genomic DNA
ccaggagacacggaatatgaagg

SEQ ID NO: 3916 - DNA, 23 bp, Homo sapiens
  source 1..23: mol_type = genomic DNA
ccaggagacacggaatgtgaagg

SEQ ID NO: 3917 - DNA, 23 bp, Homo sapiens
  source 1..23: mol_type = genomic DNA
ccaggcagcaacagtgcccaggg

SEQ ID NO: 3918 - DNA, 23 bp, Homo sapiens
  source 1..23: mol_type = genomic DNA
ccaggcagcgacagtgcccaggg

SEQ ID NO: 3919 - DNA, 23 bp, Homo sapiens
  source 1..23: mol_type = genomic DNA
ccaggcagtgacagtgcccaggg

SEQ ID NO: 3920 - DNA, 23 bp, Homo sapiens
  source 1..23: mol_type = genomic DNA
ccaggcctcccgagagcagcagg

SEQ ID NO: 3921 - DNA, 23 bp, Homo sapiens
  source 1..23: mol_type = genomic DNA
ccagggcccccaagagtagcagg

SEQ ID NO: 3922 - DNA, 23 bp, Homo sapiens
  source 1..23: mol_type = genomic DNA
ccagggccccccagagcagcagg

SEQ ID NO: 3923 - DNA, 23 bp, Homo sapiens
  source 1..23: mol_type = genomic DNA
ccagggcccccgagagtagcagg

SEQ ID NO: 3924 - DNA, 23 bp, Homo sapiens
  source 1..23: mol_type = genomic DNA
ccagggccgccgagagcagcagg

SEQ ID NO: 3925 - DNA, 23 bp, Homo sapiens
  source 1..23: mol_type = genomic DNA
ccagggccgtgtctgcattgggg

SEQ ID NO: 3926 - DNA, 23 bp, Homo sapiens
  source 1..23: mol_type = genomic DNA
ccagggccttaaggtcctagagg

SEQ ID NO: 3927 - DNA, 23 bp, Homo sapiens
  source 1..23: mol_type = genomic DNA
ccagggctcccgagagcagcagg

SEQ ID NO: 3928 - DNA, 23 bp, Homo sapiens
  source 1..23: mol_type = genomic DNA
ccaggtcacccacagtctccggg

SEQ ID NO: 3929 - DNA, 23 bp, Homo sapiens
  source 1..23: mol_type = genomic DNA
ccaggtcagggctgaggcttggg

SEQ ID NO: 3930 - DNA, 23 bp, Homo sapiens
  source 1..23: mol_type = genomic DNA
ccaggtccctgtgtccaggctgg

SEQ ID NO: 3931 - DNA, 23 bp, Homo sapiens
  source 1..23: mol_type = genomic DNA
ccaggtcgcccacagtctccggg

SEQ ID NO: 3932 - DNA, 23 bp, Homo sapiens
  source 1..23: mol_type = genomic DNA
ccaggtctcgatcagggccaggg

SEQ ID NO: 3933 - DNA, 23 bp, Homo sapiens
  source 1..23: mol_type = genomic DNA
ccaggtctcggtcagggccaggg

SEQ ID NO: 3934 - DNA, 23 bp, Homo sapiens
  source 1..23: mol_type = genomic DNA
ccaggtctgggtcagggccaggg

SEQ ID NO: 3935 - DNA, 23 bp, Homo sapiens
  source 1..23: mol_type = genomic DNA
ccaggtgcctgcgtccaggctgg

SEQ ID NO: 3936 - DNA, 23 bp, Homo sapiens
  source 1..23: mol_type = genomic DNA
ccaggtgcctgtgtccaggctgg

SEQ ID NO: 3937 - DNA, 23 bp, Homo sapiens
  source 1..23: mol_type = genomic DNA
ccaggtggcccacagtctccggg

SEQ ID NO: 3938 - DNA, 23 bp, Homo sapiens
  source 1..23: mol_type = genomic DNA
ccaggttggtcggggcggggcgg

SEQ ID NO: 3939 - DNA, 23 bp, Homo sapiens
  source 1..23: mol_type = genomic DNA
ccagtacgcctacgacggcaagg

SEQ ID NO: 3940 - DNA, 23 bp, Homo sapiens
  source 1..23: mol_type = genomic DNA
ccagtcacagactgaccgagtgg

SEQ ID NO: 3941 - DNA, 23 bp, Homo sapiens
  source 1..23: mol_type = genomic DNA
ccagtccaccatccccatcgtgg

SEQ ID NO: 3942 - DNA, 23 bp, Homo sapiens
  source 1..23: mol_type = genomic DNA
ccagtccaccgtccccatcgtgg

SEQ ID NO: 3943 - DNA, 23 bp, Homo sapiens
  source 1..23: mol_type = genomic DNA
ccagtcccccaagccctgcccgg

SEQ ID NO: 3944 - DNA, 23 bp, Homo sapiens
  source 1..23: mol_type = genomic DNA
ccagtcccccgagccccgcccgg

SEQ ID NO: 3945 - DNA, 23 bp, Homo sapiens
  source 1..23: mol_type = genomic DNA
ccagtcccccgagccccgtccgg

SEQ ID NO: 3946 - DNA, 23 bp, Homo sapiens
  source 1..23: mol_type = genomic DNA
ccagtcccgaccaacccgcgggg

SEQ ID NO: 3947 - DNA, 23 bp, Homo sapiens
  source 1..23: mol_type = genomic DNA
ccagtccgcctacgacggcaagg

SEQ ID NO: 3948 - DNA, 23 bp, Homo sapiens
  source 1..23: mol_type = genomic DNA
ccagtgagtgaccccggcccggg

SEQ ID NO: 3949 - DNA, 23 bp, Homo sapiens
  source 1..23: mol_type = genomic DNA
ccagttagcctacgacggcaagg

SEQ ID NO: 3950 - DNA, 23 bp, Homo sapiens
  source 1..23: mol_type = genomic DNA
ccagttcgcctacgacggcaagg

SEQ ID NO: 3951 - DNA, 23 bp, Homo sapiens
  source 1..23: mol_type = genomic DNA
ccatagctcctaggacagctagg

SEQ ID NO: 3952 - DNA, 23 bp, Homo sapiens
  source 1..23: mol_type = genomic DNA
ccatcacagctgcccacttctgg

SEQ ID NO: 3953 - DNA, 23 bp, Homo sapiens
  source 1..23: mol_type = genomic DNA
ccatcccatctctgaccatgagg

SEQ ID NO: 3954 - DNA, 23 bp, Homo sapiens
  source 1..23: mol_type = genomic DNA
ccatcccccacggacggcccggg

SEQ ID NO: 3955 - DNA, 23 bp, Homo sapiens
  source 1..23: mol_type = genomic DNA
ccatcccccacgtacggcccggg

SEQ ID NO: 3956 - DNA, 23 bp, Homo sapiens
  source 1..23: mol_type = genomic DNA
ccatcccgtctctgaccatgagg

SEQ ID NO: 3957 - DNA, 23 bp, Homo sapiens
  source 1..23: mol_type = genomic DNA
ccatctcagggtgaggggctcgg

SEQ ID NO: 3958 - DNA, 23 bp, Homo sapiens
  source 1..23: mol_type = genomic DNA
ccatctcagggtgaggggcttgg

SEQ ID NO: 3959 - DNA, 23 bp, Homo sapiens
  source 1..23: mol_type = genomic DNA
ccatctcccgtagatctcccggg

SEQ ID NO: 3960 - DNA, 23 bp, Homo sapiens
  source 1..23: mol_type = genomic DNA
ccatctcctatagatctcccggg

SEQ ID NO: 3961 - DNA, 23 bp, Homo sapiens
  source 1..23: mol_type = genomic DNA
ccatctcctataggtcgccgggg

SEQ ID NO: 3962 - DNA, 23 bp, Homo sapiens
  source 1..23: mol_type = genomic DNA
ccatctcctgtagatctcccggg

SEQ ID NO: 3963 - DNA, 23 bp, Homo sapiens
  source 1..23: mol_type = genomic DNA
ccatctcgtctctgaccatgagg

SEQ ID NO: 3964 - DNA, 23 bp, Homo sapiens
  source 1..23: mol_type = genomic DNA
ccatctctgcctcaacttcatgg

SEQ ID NO: 3965 - DNA, 23 bp, Homo sapiens
  source 1..23: mol_type = genomic DNA
ccatctctgtctcaacttcatgg

SEQ ID NO: 3966 - DNA, 23 bp, Homo sapiens
  source 1..23: mol_type = genomic DNA
ccatgaagttgagacagagatgg

SEQ ID NO: 3967 - DNA, 23 bp, Homo sapiens
  source 1..23: mol_type = genomic DNA
ccatgaagttgaggcagagatgg

SEQ ID NO: 3968 - DNA, 23 bp, Homo sapiens
  source 1..23: mol_type = genomic DNA
ccatgatggggatggtaggctgg

SEQ ID NO: 3969 - DNA, 23 bp, Homo sapiens
  source 1..23: mol_type = genomic DNA
ccatgatggggatggtgggctgg

SEQ ID NO: 3970 - DNA, 23 bp, Homo sapiens
  source 1..23: mol_type = genomic DNA
ccatgtcccggcccggccgcggg

SEQ ID NO: 3971 - DNA, 23 bp, Homo sapiens
  source 1..23: mol_type = genomic DNA
ccatgtcccggcctggccgcggg

SEQ ID NO: 3972 - DNA, 23 bp, Homo sapiens
  source 1..23: mol_type = genomic DNA
ccatgtgaccagcctgagaatgg

SEQ ID NO: 3973 - DNA, 23 bp, Homo sapiens
  source 1..23: mol_type = genomic DNA
ccatgtgaccatcctgagaacgg

SEQ ID NO: 3974 - DNA, 23 bp, Homo sapiens
  source 1..23: mol_type = genomic DNA
ccatgtgaccatcctgagaatgg

SEQ ID NO: 3975 - DNA, 23 bp, Homo sapiens
  source 1..23: mol_type = genomic DNA
ccatgtgactatcctgagaatgg

SEQ ID NO: 3976 - DNA, 23 bp, Homo sapiens
  source 1..23: mol_type = genomic DNA
ccattctcaggatagtcacatgg

SEQ ID NO: 3977 - DNA, 23 bp, Homo sapiens
  source 1..23: mol_type = genomic DNA
ccattctcaggatggtcacatgg

SEQ ID NO: 3978 - DNA, 23 bp, Homo sapiens
  source 1..23: mol_type = genomic DNA
ccattctcaggctggtcacatgg

SEQ ID NO: 3979 - DNA, 23 bp, Homo sapiens
  source 1..23: mol_type = genomic DNA
ccattttcctcccctcctcgtgg

SEQ ID NO: 3980 - DNA, 23 bp, Homo sapiens
  source 1..23: mol_type = genomic DNA
ccattttcctcctcttctcgtgg

SEQ ID NO: 3981 - DNA, 23 bp, Homo sapiens
  source 1..23: mol_type = genomic DNA
ccattttcctcttcttctcgtgg

SEQ ID NO: 3982 - DNA, 23 bp, Homo sapiens
  source 1..23: mol_type = genomic DNA
cccaacacccaacacacatcagg

SEQ ID NO: 3983 - DNA, 23 bp, Homo sapiens
  source 1..23: mol_type = genomic DNA
cccaacacccaacacacattagg

SEQ ID NO: 3984 - DNA, 23 bp, Homo sapiens
  source 1..23: mol_type = genomic DNA
cccaacttgggcatcgtttctgg

SEQ ID NO: 3985 - DNA, 23 bp, Homo sapiens
  source 1..23: mol_type = genomic DNA
cccaagcctcagccctgacccgg

SEQ ID NO: 3986 - DNA, 23 bp, Homo sapiens
  source 1..23: mol_type = genomic DNA
cccaagcctcagccctgacctgg

SEQ ID NO: 3987 - DNA, 23 bp, Homo sapiens
  source 1..23: mol_type = genomic DNA
cccaatccatacaccgccttcgg

SEQ ID NO: 3988 - DNA, 23 bp, Homo sapiens
  source 1..23: mol_type = genomic DNA
cccaatccatataccgccttcgg

SEQ ID NO: 3989 - DNA, 23 bp, Homo sapiens
  source 1..23: mol_type = genomic DNA
cccaatgcagacaaggctctcgg

SEQ ID NO: 3990 - DNA, 23 bp, Homo sapiens
  source 1..23: mol_type = genomic DNA
cccaatgcagacacggccctggg

SEQ ID NO: 3991 - DNA, 23 bp, Homo sapiens
  source 1..23: mol_type = genomic DNA
cccaatgcagacacggcccttgg

SEQ ID NO: 3992 - DNA, 23 bp, Homo sapiens
  source 1..23: mol_type = genomic DNA
cccaatgcagacgcggccctcgg

SEQ ID NO: 3993 - DNA, 23 bp, Homo sapiens
  source 1..23: mol_type = genomic DNA
cccaatgggagtgggaaatgggg

SEQ ID NO: 3994 - DNA, 23 bp, Homo sapiens
  source 1..23: mol_type = genomic DNA
cccaatgggagtgggaagtgggg

SEQ ID NO: 3995 - DNA, 23 bp, Homo sapiens
  source 1..23: mol_type = genomic DNA
cccaatgggagtgggaattgggg

SEQ ID NO: 3996 - DNA, 23 bp, Homo sapiens
  source 1..23: mol_type = genomic DNA
cccacacaggcagctgtctcagg

SEQ ID NO: 3997 - DNA, 23 bp, Homo sapiens
  source 1..23: mol_type = genomic DNA
cccacagaacatgtggctagagg

SEQ ID NO: 3998 - DNA, 23 bp, Homo sapiens
  source 1..23: mol_type = genomic DNA
cccacagaagatgtggctagagg

SEQ ID NO: 3999 - DNA, 23 bp, Homo sapiens
  source 1..23: mol_type = genomic DNA
cccacgggcgcctcctccgcggg

SEQ ID NO: 4000 - DNA, 23 bp, Homo sapiens
  source 1..23: mol_type = genomic DNA
cccagcagtcacaagtcacaggg

SEQ ID NO: 4001 - DNA, 23 bp, Homo sapiens
  source 1..23: mol_type = genomic DNA
cccagccagcaacagtgcccagg

SEQ ID NO: 4002 - DNA, 23 bp, Homo sapiens
  source 1..23: mol_type = genomic DNA
cccagccccgaccaacccgcggg

SEQ ID NO: 4003 - DNA, 23 bp, Homo sapiens
  source 1..23: mol_type = genomic DNA
cccagccccgaccaacccggggg

SEQ ID NO: 4004 - DNA, 23 bp, Homo sapiens
  source 1..23: mol_type = genomic DNA
cccagctgtcctggctgtcctgg

SEQ ID NO: 4005 - DNA, 23 bp, Homo sapiens
  source 1..23: mol_type = genomic DNA
cccaggcagcaacagtgcccagg

SEQ ID NO: 4006 - DNA, 23 bp, Homo sapiens
  source 1..23: mol_type = genomic DNA
cccaggcagtgacagtgcccagg

SEQ ID NO: 4007 - DNA, 23 bp, Homo sapiens
  source 1..23: mol_type = genomic DNA
cccaggccggggtcactcaccgg

SEQ ID NO: 4008 - DNA, 23 bp, Homo sapiens
  source 1..23: mol_type = genomic DNA
cccagggccgtgtctgcattggg

SEQ ID NO: 4009 - DNA, 23 bp, Homo sapiens
  source 1..23: mol_type = genomic DNA
cccaggtctcgatcagggccagg

SEQ ID NO: 4010 - DNA, 23 bp, Homo sapiens
  source 1..23: mol_type = genomic DNA
cccaggtctcggtcagggccagg

SEQ ID NO: 4011 - DNA, 23 bp, Homo sapiens
  source 1..23: mol_type = genomic DNA
cccaggtctgggtcagggccagg

SEQ ID NO: 4012 - DNA, 23 bp, Homo sapiens
  source 1..23: mol_type = genomic DNA
cccagtcacccacccggactcgg

SEQ ID NO: 4013 - DNA, 23 bp, Homo sapiens
  source 1..23: mol_type = genomic DNA
cccagtcccgaccaacccgcggg

SEQ ID NO: 4014 - DNA, 23 bp, Homo sapiens
  source 1..23: mol_type = genomic DNA
cccagtgcagacacggcccttgg

SEQ ID NO: 4015 - DNA, 23 bp, Homo sapiens
  source 1..23: mol_type = genomic DNA
cccatcatgggcatcgttgctgg

SEQ ID NO: 4016 - DNA, 23 bp, Homo sapiens
  source 1..23: mol_type = genomic DNA
cccatcccccacggacggcccgg

SEQ ID NO: 4017 - DNA, 23 bp, Homo sapiens
  source 1..23: mol_type = genomic DNA
cccatcccccacgtacggcccgg

SEQ ID NO: 4018 - DNA, 23 bp, Homo sapiens
  source 1..23: mol_type = genomic DNA
cccatcgtgggcatcattgctgg

SEQ ID NO: 4019 - DNA, 23 bp, Homo sapiens
  source 1..23: mol_type = genomic DNA
cccatcgtgggcatccttgctgg

SEQ ID NO: 4020 - DNA, 23 bp, Homo sapiens
  source 1..23: mol_type = genomic DNA
cccatcgtgggcatcgttgctgg

SEQ ID NO: 4021 - DNA, 23 bp, Homo sapiens
  source 1..23: mol_type = genomic DNA
cccatcgtgggcattgttgctgg

SEQ ID NO: 4022 - DNA, 23 bp, Homo sapiens
  source 1..23: mol_type = genomic DNA
cccatctcccgtagatctcccgg

SEQ ID NO: 4023 - DNA, 23 bp, Homo sapiens
  source 1..23: mol_type = genomic DNA
cccatctcctatagatctcccgg

SEQ ID NO: 4024 - DNA, 23 bp, Homo sapiens
  source 1..23: mol_type = genomic DNA
cccatctcctataggtcgccggg

SEQ ID NO: 4025 - DNA, 23 bp, Homo sapiens
  source 1..23: mol_type = genomic DNA
cccatctcctgtagatctcccgg

SEQ ID NO: 4026 - DNA, 23 bp, Homo sapiens
  source 1..23: mol_type = genomic DNA
cccattctccattcaagggaggg

SEQ ID NO: 4027 - DNA, 23 bp, Homo sapiens
  source 1..23: mol_type = genomic DNA
cccattgcagacgcggccctcgg

SEQ ID NO: 4028 - DNA, 23 bp, Homo sapiens
  source 1..23: mol_type = genomic DNA
cccattgtgggcatcattgctgg

SEQ ID NO: 4029 - DNA, 23 bp, Homo sapiens
  source 1..23: mol_type = genomic DNA
ccccaaacacactgagtgtgagg

SEQ ID NO: 4030 - DNA, 23 bp, Homo sapiens
  source 1..23: mol_type = genomic DNA
ccccaacaccacaaccaccaagg

SEQ ID NO: 4031 - DNA, 23 bp, Homo sapiens
  source 1..23: mol_type = genomic DNA
ccccaacaccacaaccatcaagg

SEQ ID NO: 4032 - DNA, 23 bp, Homo sapiens
  source 1..23: mol_type = genomic DNA
ccccaacaccacaaccatcgagg

SEQ ID NO: 4033 - DNA, 23 bp, Homo sapiens
  source 1..23: mol_type = genomic DNA
ccccaacaccataatcatcaagg

SEQ ID NO: 4034 - DNA, 23 bp, Homo sapiens
  source 1..23: mol_type = genomic DNA
ccccaagagtagcaggaggaggg

SEQ ID NO: 4035 - DNA, 23 bp, Homo sapiens
  source 1..23: mol_type = genomic DNA
ccccaatgcagacacggccctgg

SEQ ID NO: 4036 - DNA, 23 bp, Homo sapiens
  source 1..23: mol_type = genomic DNA
ccccaattcccactcccattggg

SEQ ID NO: 4037 - DNA, 23 bp, Homo sapiens
  source 1..23: mol_type = genomic DNA
ccccacgggcgcctcctccgcgg

SEQ ID NO: 4038 - DNA, 23 bp, Homo sapiens
  source 1..23: mol_type = genomic DNA
ccccacttcccactcccattggg

SEQ ID NO: 4039 - DNA, 23 bp, Homo sapiens
  source 1..23: mol_type = genomic DNA
ccccagccccgaccaacccgcgg

SEQ ID NO: 4040 - DNA, 23 bp, Homo sapiens
  source 1..23: mol_type = genomic DNA
ccccaggctcccaatccatgagg

SEQ ID NO: 4041 - DNA, 23 bp, Homo sapiens
  source 1..23: mol_type = genomic DNA
ccccaggctcccactccatgagg

SEQ ID NO: 4042 - DNA, 23 bp, Homo sapiens
  source 1..23: mol_type = genomic DNA
ccccaggctctcactccatgagg

SEQ ID NO: 4043 - DNA, 23 bp, Homo sapiens
  source 1..23: mol_type = genomic DNA
ccccagtcccgaccaacccgcgg

SEQ ID NO: 4044 - DNA, 23 bp, Homo sapiens
  source 1..23: mol_type = genomic DNA
ccccagtctcccactccatgagg

SEQ ID NO: 4045 - DNA, 23 bp, Homo sapiens
  source 1..23: mol_type = genomic DNA
ccccatctcctataggtcgccgg

SEQ ID NO: 4046 - DNA, 23 bp, Homo sapiens
  source 1..23: mol_type = genomic DNA
ccccatttcccactcccattggg

SEQ ID NO: 4047 - DNA, 23 bp, Homo sapiens
  source 1..23: mol_type = genomic DNA
cccccaagagtagcaggaggagg

SEQ ID NO: 4048 - DNA, 23 bp, Homo sapiens
  source 1..23: mol_type = genomic DNA
cccccagagcagcaggaggacgg

SEQ ID NO: 4049 - DNA, 23 bp, Homo sapiens
  source 1..23: mol_type = genomic DNA
cccccagagcagcaggaggaggg

SEQ ID NO: 4050 - DNA, 23 bp, Homo sapiens
  source 1..23: mol_type = genomic DNA
cccccaggttggtcggggcgggg

SEQ ID NO: 4051 - DNA, 23 bp, Homo sapiens
  source 1..23: mol_type = genomic DNA
ccccccagagcagcaggaggagg

SEQ ID NO: 4052 - DNA, 23 bp, Homo sapiens
  source 1..23: mol_type = genomic DNA
ccccccaggttggtcggggcggg

SEQ ID NO: 4053 - DNA, 23 bp, Homo sapiens
  source 1..23: mol_type = genomic DNA
ccccccgggtgggtcggggcggg

SEQ ID NO: 4054 - DNA, 23 bp, Homo sapiens
  source 1..23: mol_type = genomic DNA
ccccccgggttggtcggggccgg

SEQ ID NO: 4055 - DNA, 23 bp, Homo sapiens
  source 1..23: mol_type = genomic DNA
ccccccgggttggtcggggcggg

SEQ ID NO: 4056 - DNA, 23 bp, Homo sapiens
  source 1..23: mol_type = genomic DNA
ccccccgggttggtcggggctgg

SEQ ID NO: 4057 - DNA, 23 bp, Homo sapiens
  source 1..23: mol_type = genomic DNA
cccccgagagtagcaggacgagg

SEQ ID NO: 4058 - DNA, 23 bp, Homo sapiens
  source 1..23: mol_type = genomic DNA
cccccgagagtagcaggaggagg

SEQ ID NO: 4059 - DNA, 23 bp, Homo sapiens
  source 1..23: mol_type = genomic DNA
cccccgggtgggtcggggcgggg

SEQ ID NO: 4060 - DNA, 23 bp, Homo sapiens
  source 1..23: mol_type = genomic DNA
cccccgggttggtcggggccggg

SEQ ID NO: 4061 - DNA, 23 bp, Homo sapiens
  source 1..23: mol_type = genomic DNA
cccccgggttggtcggggcgggg

SEQ ID NO: 4062 - DNA, 23 bp, Homo sapiens
  source 1..23: mol_type = genomic DNA
cccccgggttggtcggggctggg

SEQ ID NO: 4063 - DNA, 23 bp, Homo sapiens
  source 1..23: mol_type = genomic DNA
ccccctccttaccccatctcagg

SEQ ID NO: 4064 - DNA, 23 bp, Homo sapiens
  source 1..23: mol_type = genomic DNA
ccccctccttactccatctcagg

SEQ ID NO: 4065 - DNA, 23 bp, Homo sapiens
  source 1..23: mol_type = genomic DNA
ccccgaccccgcggtcagcccgg

SEQ ID NO: 4066 - DNA, 23 bp, Homo sapiens
  source 1..23: mol_type = genomic DNA
ccccgagagtagcaggacgaggg

SEQ ID NO: 4067 - DNA, 23 bp, Homo sapiens
  source 1..23: mol_type = genomic DNA
ccccgagagtagcaggaggaggg

SEQ ID NO: 4068 - DNA, 23 bp, Homo sapiens
  source 1..23: mol_type = genomic DNA
ccccgcccccgtggtcagcccgg

SEQ ID NO: 4069 - DNA, 23 bp, Homo sapiens
  source 1..23: mol_type = genomic DNA
ccccgccccgaccaacccgcggg

SEQ ID NO: 4070 - DNA, 23 bp, Homo sapiens
  source 1..23: mol_type = genomic DNA
ccccgccccgaccaacccggggg

SEQ ID NO: 4071 - DNA, 23 bp, Homo sapiens
  source 1..23: mol_type = genomic DNA
ccccgccccgaccaacctggggg

SEQ ID NO: 4072 - DNA, 23 bp, Homo sapiens
  source 1..23: mol_type = genomic DNA
ccccgccccgacccacccggggg

SEQ ID NO: 4073 - DNA, 23 bp, Homo sapiens
  source 1..23: mol_type = genomic DNA
ccccgccccgcccaacccgcggg

SEQ ID NO: 4074 - DNA, 23 bp, Homo sapiens
  source 1..23: mol_type = genomic DNA
ccccgccctgaccaacccgcggg

SEQ ID NO: 4075 - DNA, 23 bp, Homo sapiens
  source 1..23: mol_type = genomic DNA
ccccgcgggttgggcggggcggg

SEQ ID NO: 4076 - DNA, 23 bp, Homo sapiens
  source 1..23: mol_type = genomic DNA
ccccgcgggttggtcagggcggg

SEQ ID NO: 4077 - DNA, 23 bp, Homo sapiens
  source 1..23: mol_type = genomic DNA
ccccgcgggttggtcgggactgg

SEQ ID NO: 4078 - DNA, 23 bp, Homo sapiens
  source 1..23: mol_type = genomic DNA
ccccgcgggttggtcggggcggg

SEQ ID NO: 4079 - DNA, 23 bp, Homo sapiens
  source 1..23: mol_type = genomic DNA
ccccgcgggttggtcggggctgg

SEQ ID NO: 4080 - DNA, 23 bp, Homo sapiens
  source 1..23: mol_type = genomic DNA
ccccggccggggtcactcaccgg

SEQ ID NO: 4081 - DNA, 23 bp, Homo sapiens
  source 1..23: mol_type = genomic DNA
ccccggcgacctataggagatgg

SEQ ID NO: 4082 - DNA, 23 bp, Homo sapiens
  source 1..23: mol_type = genomic DNA
ccccgggcggggtcactcaccgg

SEQ ID NO: 4083 - DNA, 23 bp, Homo sapiens
  source 1..23: mol_type = genomic DNA
cccctccttaccccagctcaggg

SEQ ID NO: 4084 - DNA, 23 bp, Homo sapiens
  source 1..23: mol_type = genomic DNA
cccctccttaccccatctcaggg

SEQ ID NO: 4085 - DNA, 23 bp, Homo sapiens
  source 1..23: mol_type = genomic DNA
cccctccttactccatctcaggg

SEQ ID NO: 4086 - DNA, 23 bp, Homo sapiens
  source 1..23: mol_type = genomic DNA
cccctcgctcctccccacagagg

SEQ ID NO: 4087 - DNA, 23 bp, Homo sapiens
  source 1..23: mol_type = genomic DNA
cccctcgctcctcccggcagagg

SEQ ID NO: 4088 - DNA, 23 bp, Homo sapiens
  source 1..23: mol_type = genomic DNA
cccctcgctcctctccccagagg

SEQ ID NO: 4089 - DNA, 23 bp, Homo sapiens
  source 1..23: mol_type = genomic DNA
cccctcgctcctctccgcagagg

SEQ ID NO: 4090 - DNA, 23 bp, Homo sapiens
  source 1..23: mol_type = genomic DNA
cccctctctcctccccacagagg

SEQ ID NO: 4091 - DNA, 23 bp, Homo sapiens
  source 1..23: mol_type = genomic DNA
cccctgtgacttgtgactgctgg

SEQ ID NO: 4092 - DNA, 23 bp, Homo sapiens
  source 1..23: mol_type = genomic DNA
ccccttgctcctccctacagagg

SEQ ID NO: 4093 - DNA, 23 bp, Homo sapiens
  source 1..23: mol_type = genomic DNA
ccccttgcttctccccacagagg

SEQ ID NO: 4094 - DNA, 23 bp, Homo sapiens
  source 1..23: mol_type = genomic DNA
ccccttgcttctccccgcagagg

SEQ ID NO: 4095 - DNA, 23 bp, Homo sapiens
  source 1..23: mol_type = genomic DNA
cccgaaggcggtatatggattgg

SEQ ID NO: 4096 - DNA, 23 bp, Homo sapiens
  source 1..23: mol_type = genomic DNA
cccgaaggcggtgtatggattgg

SEQ ID NO: 4097 - DNA, 23 bp, Homo sapiens
  source 1..23: mol_type = genomic DNA
cccgacgggcgcctcctccgcgg

SEQ ID NO: 4098 - DNA, 23 bp, Homo sapiens
  source 1..23: mol_type = genomic DNA
cccgacgggcgcttcctccgcgg

SEQ ID NO: 4099 - DNA, 23 bp, Homo sapiens
  source 1..23: mol_type = genomic DNA
cccgccccgaccaacccgcgggg

SEQ ID NO: 4100 - DNA, 23 bp, Homo sapiens
  source 1..23: mol_type = genomic DNA
cccgccccgaccaacccgggggg

SEQ ID NO: 4101 - DNA, 23 bp, Homo sapiens
  source 1..23: mol_type = genomic DNA
cccgccccgaccaacctgggggg

SEQ ID NO: 4102 - DNA, 23 bp, Homo sapiens
  source 1..23: mol_type = genomic DNA
cccgccccgacccacccgggggg

SEQ ID NO: 4103 - DNA, 23 bp, Homo sapiens
  source 1..23: mol_type = genomic DNA
cccgccccgcccaacccgcgggg

SEQ ID NO: 4104 - DNA, 23 bp, Homo sapiens
  source 1..23: mol_type = genomic DNA
cccgccctgaccaacccgcgggg

SEQ ID NO: 4105 - DNA, 23 bp, Homo sapiens
  source 1..23: mol_type = genomic DNA
cccgcggaggaagcgcccgtcgg

SEQ ID NO: 4106 - DNA, 23 bp, Homo sapiens
  source 1..23: mol_type = genomic DNA
cccgcggaggaggcgcccgtcgg

SEQ ID NO: 4107 - DNA, 23 bp, Homo sapiens
  source 1..23: mol_type = genomic DNA
cccgcggaggaggcgcccgtggg

SEQ ID NO: 4108 - DNA, 23 bp, Homo sapiens
  source 1..23: mol_type = genomic DNA
cccgcggccaggccgggacatgg

SEQ ID NO: 4109 - DNA, 23 bp, Homo sapiens
  source 1..23: mol_type = genomic DNA
cccgcggccgggccaggacacgg

SEQ ID NO: 4110 - DNA, 23 bp, Homo sapiens
  source 1..23: mol_type = genomic DNA
cccgcggccgggccgggacacgg

SEQ ID NO: 4111 - DNA, 23 bp, Homo sapiens
  source 1..23: mol_type = genomic DNA
cccgcggccgggccgggacatgg

SEQ ID NO: 4112 - DNA, 23 bp, Homo sapiens
  source 1..23: mol_type = genomic DNA
cccgcgggttgggcggggcgggg

SEQ ID NO: 4113 - DNA, 23 bp, Homo sapiens
  source 1..23: mol_type = genomic DNA
cccgcgggttggtcagggcgggg

SEQ ID NO: 4114 - DNA, 23 bp, Homo sapiens
  source 1..23: mol_type = genomic DNA
cccgcgggttggtcgggactggg

SEQ ID NO: 4115 - DNA, 23 bp, Homo sapiens
  source 1..23: mol_type = genomic DNA
cccgcgggttggtcggggcgggg

SEQ ID NO: 4116 - DNA, 23 bp, Homo sapiens
  source 1..23: mol_type = genomic DNA
cccgcgggttggtcggggctggg

SEQ ID NO: 4117 - DNA, 23 bp, Homo sapiens
  source 1..23: mol_type = genomic DNA
cccggaccccgaggtcagcccgg

SEQ ID NO: 4118 - DNA, 23 bp, Homo sapiens
  source 1..23: mol_type = genomic DNA
cccggaccccgcggtcagcccgg

SEQ ID NO: 4119 - DNA, 23 bp, Homo sapiens
  source 1..23: mol_type = genomic DNA
cccggagactcggggcgacccgg

SEQ ID NO: 4120 - DNA, 23 bp, Homo sapiens
  source 1..23: mol_type = genomic DNA
cccggagactgtgggccacctgg

SEQ ID NO: 4121 - DNA, 23 bp, Homo sapiens
  source 1..23: mol_type = genomic DNA
cccggagactgtgggcgacccgg

SEQ ID NO: 4122 - DNA, 23 bp, Homo sapiens
  source 1..23: mol_type = genomic DNA
cccggagactgtgggcgacctgg

SEQ ID NO: 4123 - DNA, 23 bp, Homo sapiens
  source 1..23: mol_type = genomic DNA
cccggagactgtgggtgacctgg

SEQ ID NO: 4124 - DNA, 23 bp, Homo sapiens
  source 1..23: mol_type = genomic DNA
cccggccccgaccaacccggggg

SEQ ID NO: 4125 - DNA, 23 bp, Homo sapiens
  source 1..23: mol_type = genomic DNA
cccggccgggggcgcaggtcagg

SEQ ID NO: 4126 - DNA, 23 bp, Homo sapiens
  source 1..23: mol_type = genomic DNA
cccggcgacctataggagatggg

SEQ ID NO: 4127 - DNA, 23 bp, Homo sapiens
  source 1..23: mol_type = genomic DNA
cccggcgagggcgcaggacccgg

SEQ ID NO: 4128 - DNA, 23 bp, Homo sapiens
  source 1..23: mol_type = genomic DNA
cccggcggggacgcaggacccgg

SEQ ID NO: 4129 - DNA, 23 bp, Homo sapiens
  source 1..23: mol_type = genomic DNA
cccggcgggggcgcaggacccgg

SEQ ID NO: 4130 - DNA, 23 bp, Homo sapiens
  source 1..23: mol_type = genomic DNA
cccggctgaagggctccagaagg

SEQ ID NO: 4131 - DNA, 23 bp, Homo sapiens
  source 1..23: mol_type = genomic DNA
cccgggagatctacaggagatgg

SEQ ID NO: 4132 - DNA, 23 bp, Homo sapiens
  source 1..23: mol_type = genomic DNA
cccgggagatctacgggagatgg

SEQ ID NO: 4133 - DNA, 23 bp, Homo sapiens
  source 1..23: mol_type = genomic DNA
cccgggagatctataggagatgg

SEQ ID NO: 4134 - DNA, 23 bp, Homo sapiens
  source 1..23: mol_type = genomic DNA
cccgggccggggtcactcaccgg

SEQ ID NO: 4135 - DNA, 23 bp, Homo sapiens
  source 1..23: mol_type = genomic DNA
cccgggccggggtcactcactgg

SEQ ID NO: 4136 - DNA, 23 bp, Homo sapiens
  source 1..23: mol_type = genomic DNA
cccgggccgtacgtgggggatgg

SEQ ID NO: 4137 - DNA, 23 bp, Homo sapiens
  source 1..23: mol_type = genomic DNA
cccgggccgtccgtgggggatgg

SEQ ID NO: 4138 - DNA, 23 bp, Homo sapiens
  source 1..23: mol_type = genomic DNA
cccgggctggggtcactcaccgg

SEQ ID NO: 4139 - DNA, 23 bp, Homo sapiens
  source 1..23: mol_type = genomic DNA
cccgggtcctgcgcccccgccgg

SEQ ID NO: 4140 - DNA, 23 bp, Homo sapiens
  source 1..23: mol_type = genomic DNA
cccgggtcctgcgccctcgccgg

SEQ ID NO: 4141 - DNA, 23 bp, Homo sapiens
  source 1..23: mol_type = genomic DNA
cccgggtcctgcgtccccgccgg

SEQ ID NO: 4142 - DNA, 23 bp, Homo sapiens
  source 1..23: mol_type = genomic DNA
cccgggtcgccccgagtctccgg

SEQ ID NO: 4143 - DNA, 23 bp, Homo sapiens
  source 1..23: mol_type = genomic DNA
cccggtcctgcgcccccgccagg

SEQ ID NO: 4144 - DNA, 23 bp, Homo sapiens
  source 1..23: mol_type = genomic DNA
cccggtttcattttcagttgagg

SEQ ID NO: 4145 - DNA, 23 bp, Homo sapiens
  source 1..23: mol_type = genomic DNA
cccggtttcattttcagtttagg

SEQ ID NO: 4146 - DNA, 23 bp, Homo sapiens
  source 1..23: mol_type = genomic DNA
cccggtttcattttcggtttagg

SEQ ID NO: 4147 - DNA, 23 bp, Homo sapiens
  source 1..23: mol_type = genomic DNA
cccgtctgagatccaccccaagg

SEQ ID NO: 4148 - DNA, 23 bp, Homo sapiens
  source 1..23: mol_type = genomic DNA
cccgtctgagatccaccccgagg

SEQ ID NO: 4149 - DNA, 23 bp, Homo sapiens
  source 1..23: mol_type = genomic DNA
cccgttgcttctccccacagagg

SEQ ID NO: 4150 - DNA, 23 bp, Homo sapiens
  source 1..23: mol_type = genomic DNA
ccctccccatcccccacggacgg

SEQ ID NO: 4151 - DNA, 23 bp, Homo sapiens
  source 1..23: mol_type = genomic DNA
ccctcccgacccgcactcaccgg

SEQ ID NO: 4152 - DNA, 23 bp, Homo sapiens
  source 1..23: mol_type = genomic DNA
ccctcccttgaatggagaatggg

SEQ ID NO: 4153 - DNA, 23 bp, Homo sapiens
  source 1..23: mol_type = genomic DNA
ccctcctcatcccccacggacgg

SEQ ID NO: 4154 - DNA, 23 bp, Homo sapiens
  source 1..23: mol_type = genomic DNA
ccctcctcctgctactctcgggg

SEQ ID NO: 4155 - DNA, 23 bp, Homo sapiens
  source 1..23: mol_type = genomic DNA
ccctcctcctgctactcttgggg

SEQ ID NO: 4156 - DNA, 23 bp, Homo sapiens
  source 1..23: mol_type = genomic DNA
ccctcctcctgctgctctggggg

SEQ ID NO: 4157 - DNA, 23 bp, Homo sapiens
  source 1..23: mol_type = genomic DNA
ccctcctgagatctgtcgtcagg

SEQ ID NO: 4158 - DNA, 23 bp, Homo sapiens
  source 1..23: mol_type = genomic DNA
ccctcctgaggtctgtcctcagg

SEQ ID NO: 4159 - DNA, 23 bp, Homo sapiens
  source 1..23: mol_type = genomic DNA
ccctcgtcctgctactctcgggg

SEQ ID NO: 4160 - DNA, 23 bp, Homo sapiens
  source 1..23: mol_type = genomic DNA
ccctgacgacagatctcaggagg

SEQ ID NO: 4161 - DNA, 23 bp, Homo sapiens
  source 1..23: mol_type = genomic DNA
ccctgactttgtttctgcaaagg

SEQ ID NO: 4162 - DNA, 23 bp, Homo sapiens
  source 1..23: mol_type = genomic DNA
ccctgagatggagtaaggagggg

SEQ ID NO: 4163 - DNA, 23 bp, Homo sapiens
  source 1..23: mol_type = genomic DNA
ccctgagatggggtaaggagggg

SEQ ID NO: 4164 - DNA, 23 bp, Homo sapiens
  source 1..23: mol_type = genomic DNA
ccctgagctggggtaaggagggg

SEQ ID NO: 4165 - DNA, 23 bp, Homo sapiens
  source 1..23: mol_type = genomic DNA
ccctgaggacagacctcaggagg

SEQ ID NO: 4166 - DNA, 23 bp, Homo sapiens
  source 1..23: mol_type = genomic DNA
ccctgccgacccgcactcaccgg

SEQ ID NO: 4167 - DNA, 23 bp, Homo sapiens
  source 1..23: mol_type = genomic DNA
ccctgctaaggacagaccttagg

SEQ ID NO: 4168 - DNA, 23 bp, Homo sapiens
  source 1..23: mol_type = genomic DNA
ccctgctgaagggctccagaagg

SEQ ID NO: 4169 - DNA, 23 bp, Homo sapiens
  source 1..23: mol_type = genomic DNA
ccctggccctgacccagaccagg

SEQ ID NO: 4170 - DNA, 23 bp, Homo sapiens
  source 1..23: mol_type = genomic DNA
ccctggccctgacccagacctgg

SEQ ID NO: 4171 - DNA, 23 bp, Homo sapiens
  source 1..23: mol_type = genomic DNA
ccctggccctgaccgagacctgg

SEQ ID NO: 4172 - DNA, 23 bp, Homo sapiens
  source 1..23: mol_type = genomic DNA
ccctggccctgatcgagacctgg

SEQ ID NO: 4173 - DNA, 23 bp, Homo sapiens
  source 1..23: mol_type = genomic DNA
ccctgggcactgtcactgcctgg

SEQ ID NO: 4174 - DNA, 23 bp, Homo sapiens
  source 1..23: mol_type = genomic DNA
ccctgggcactgtcgctgcctgg

SEQ ID NO: 4175 - DNA, 23 bp, Homo sapiens
  source 1..23: mol_type = genomic DNA
ccctgggcactgtcgctggctgg

SEQ ID NO: 4176 - DNA, 23 bp, Homo sapiens
  source 1..23: mol_type = genomic DNA
ccctgggcactgttgctgcctgg

SEQ ID NO: 4177 - DNA, 23 bp, Homo sapiens
  source 1..23: mol_type = genomic DNA
ccctgggcactgttgctggctgg

SEQ ID NO: 4178 - DNA, 23 bp, Homo sapiens
  source 1..23: mol_type = genomic DNA
ccctggtctgggtcagggccagg

SEQ ID NO: 4179 - DNA, 23 bp, Homo sapiens
  source 1..23: mol_type = genomic DNA
ccctgtgacttgtgactgctggg

SEQ ID NO: 4180 - DNA, 23 bp, Homo sapiens
  source 1..23: mol_type = genomic DNA
cccttctggagcccttcagcagg

SEQ ID NO: 4181 - DNA, 23 bp, Homo sapiens
  source 1..23: mol_type = genomic DNA
ccgaaaatgaaaccgggtaaagg

SEQ ID NO: 4182 - DNA, 23 bp, Homo sapiens
  source 1..23: mol_type = genomic DNA
ccgaaggcggtatatggattggg

SEQ ID NO: 4183 - DNA, 23 bp, Homo sapiens
  source 1..23: mol_type = genomic DNA
ccgaaggcggtgtatggattggg

SEQ ID NO: 4184 - DNA, 23 bp, Homo sapiens
  source 1..23: mol_type = genomic DNA
ccgacgggcgcctcctccgcggg

SEQ ID NO: 4185 - DNA, 23 bp, Homo sapiens
  source 1..23: mol_type = genomic DNA
ccgacgggcgcttcctccgcggg

SEQ ID NO: 4186 - DNA, 23 bp, Homo sapiens
  source 1..23: mol_type = genomic DNA
ccgagagccttgtctgcattggg

SEQ ID NO: 4187 - DNA, 23 bp, Homo sapiens
  source 1..23: mol_type = genomic DNA
ccgagcccctcaccctgagatgg

SEQ ID NO: 4188 - DNA, 23 bp, Homo sapiens
  source 1..23: mol_type = genomic DNA
ccgagggccgcgtctgcaatggg

SEQ ID NO: 4189 - DNA, 23 bp, Homo sapiens
  source 1..23: mol_type = genomic DNA
ccgagggccgcgtctgcattggg

SEQ ID NO: 4190 - DNA, 23 bp, Homo sapiens
  source 1..23: mol_type = genomic DNA
ccgagtccgggtgggtgactggg

SEQ ID NO: 4191 - DNA, 23 bp, Homo sapiens
  source 1..23: mol_type = genomic DNA
ccgcagcggtccaggagcgcagg

SEQ ID NO: 4192 - DNA, 23 bp, Homo sapiens
  source 1..23: mol_type = genomic DNA
ccgcccagccccgaccaacccgg

SEQ ID NO: 4193 - DNA, 23 bp, Homo sapiens
  source 1..23: mol_type = genomic DNA
ccgccccgccccgaccaacccgg

SEQ ID NO: 4194 - DNA, 23 bp, Homo sapiens
  source 1..23: mol_type = genomic DNA
ccgccccgccccgaccaacctgg

SEQ ID NO: 4195 - DNA, 23 bp, Homo sapiens
  source 1..23: mol_type = genomic DNA
ccgccccgccccgacccacccgg

SEQ ID NO: 4196 - DNA, 23 bp, Homo sapiens
  source 1..23: mol_type = genomic DNA
ccgcccggccccgaccaacccgg

SEQ ID NO: 4197 - DNA, 23 bp, Homo sapiens
  source 1..23: mol_type = genomic DNA
ccgccctcctgaaggtcctcagg

SEQ ID NO: 4198 - DNA, 23 bp, Homo sapiens
  source 1..23: mol_type = genomic DNA
ccgccgcggtccaagagcgcagg

SEQ ID NO: 4199 - DNA, 23 bp, Homo sapiens
  source 1..23: mol_type = genomic DNA
ccgccgcggtccaggagcgcagg

SEQ ID NO: 4200 - DNA, 23 bp, Homo sapiens
  source 1..23: mol_type = genomic DNA
ccgccgcggtccaggagctcagg

SEQ ID NO: 4201 - DNA, 23 bp, Homo sapiens
  source 1..23: mol_type = genomic DNA
ccgcggaggaagcgcccgtccgg

SEQ ID NO: 4202 - DNA, 23 bp, Homo sapiens
  source 1..23: mol_type = genomic DNA
ccgcggaggaagcgcccgtcggg

SEQ ID NO: 4203 - DNA, 23 bp, Homo sapiens
  source 1..23: mol_type = genomic DNA
ccgcggaggaggcgcccgtccgg

SEQ ID NO: 4204 - DNA, 23 bp, Homo sapiens
  source 1..23: mol_type = genomic DNA
ccgcggaggaggcgcccgtcggg

SEQ ID NO: 4205 - DNA, 23 bp, Homo sapiens
  source 1..23: mol_type = genomic DNA
ccgcggaggaggcgcccgtgggg

SEQ ID NO: 4206 - DNA, 23 bp, Homo sapiens
  source 1..23: mol_type = genomic DNA
ccgcggcagtccaggagcgcagg

SEQ ID NO: 4207 - DNA, 23 bp, Homo sapiens
  source 1..23: mol_type = genomic DNA
ccgcggcggtccaggagcgcagg

SEQ ID NO: 4208 - DNA, 23 bp, Homo sapiens
  source 1..23: mol_type = genomic DNA
ccgcggcggtccaggagctcagg

SEQ ID NO: 4209 - DNA, 23 bp, Homo sapiens
  source 1..23: mol_type = genomic DNA
ccgcgggttggtcgggactgggg

SEQ ID NO: 4210 - DNA, 23 bp, Homo sapiens
  source 1..23: mol_type = genomic DNA
ccgcgggttggtcggggctgggg

SEQ ID NO: 4211 - DNA, 23 bp, Homo sapiens
  source 1..23: mol_type = genomic DNA
ccgctactacaaccagagcgagg

SEQ ID NO: 4212 - DNA, 23 bp, Homo sapiens
  source 1..23: mol_type = genomic DNA
ccggaacacacagatctacaagg

SEQ ID NO: 4213 - DNA, 23 bp, Homo sapiens
  source 1..23: mol_type = genomic DNA
ccggaacacacggaaagtgaagg

SEQ ID NO: 4214 - DNA, 23 bp, Homo sapiens
  source 1..23: mol_type = genomic DNA
ccggaacacacggaatgtgaagg

SEQ ID NO: 4215 - DNA, 23 bp, Homo sapiens
  source 1..23: mol_type = genomic DNA
ccggacgggcgcctcctccgcgg

SEQ ID NO: 4216 - DNA, 23 bp, Homo sapiens
  source 1..23: mol_type = genomic DNA
ccggacgggcgcttcctccgcgg

SEQ ID NO: 4217 - DNA, 23 bp, Homo sapiens
  source 1..23: mol_type = genomic DNA
ccggacggggctcgggggactgg

SEQ ID NO: 4218 - DNA, 23 bp, Homo sapiens
  source 1..23: mol_type = genomic DNA
ccggagactcggggcgacccggg

SEQ ID NO: 4219 - DNA, 23 bp, Homo sapiens
  source 1..23: mol_type = genomic DNA
ccggccccgaccaacccgggggg

SEQ ID NO: 4220 - DNA, 23 bp, Homo sapiens
  source 1..23: mol_type = genomic DNA
ccggcgacctataggagatgggg

SEQ ID NO: 4221 - DNA, 23 bp, Homo sapiens
  source 1..23: mol_type = genomic DNA
ccggcgagggcgcaggacccggg

SEQ ID NO: 4222 - DNA, 23 bp, Homo sapiens
  source 1..23: mol_type = genomic DNA
ccggcggggacgcaggacccggg

SEQ ID NO: 4223 - DNA, 23 bp, Homo sapiens
  source 1..23: mol_type = genomic DNA
ccggcgggggcgcaggacccggg

SEQ ID NO: 4224 - DNA, 23 bp, Homo sapiens
  source 1..23: mol_type = genomic DNA
ccgggagacacagatctgcaagg

SEQ ID NO: 4225 - DNA, 23 bp, Homo sapiens
  source 1..23: mol_type = genomic DNA
ccgggagacacggaacatgaagg

SEQ ID NO: 4226 - DNA, 23 bp, Homo sapiens
  source 1..23: mol_type = genomic DNA
ccgggagactcggggcgacccgg

SEQ ID NO: 4227 - DNA, 23 bp, Homo sapiens
  source 1..23: mol_type = genomic DNA
ccgggagacttggggcgacccgg

SEQ ID NO: 4228 - DNA, 23 bp, Homo sapiens
  source 1..23: mol_type = genomic DNA
ccgggagatctacaggagatagg

SEQ ID NO: 4229 - DNA, 23 bp, Homo sapiens
  source 1..23: mol_type = genomic DNA
ccgggagatctacaggagatggg

SEQ ID NO: 4230 - DNA, 23 bp, Homo sapiens
  source 1..23: mol_type = genomic DNA
ccgggagatctacgggagatggg

SEQ ID NO: 4231 - DNA, 23 bp, Homo sapiens
  source 1..23: mol_type = genomic DNA
ccgggagatctataggagatggg

SEQ ID NO: 4232 - DNA, 23 bp, Homo sapiens
  source 1..23: mol_type = genomic DNA
ccgggcagggcttgggggactgg

SEQ ID NO: 4233 - DNA, 23 bp, Homo sapiens
  source 1..23: mol_type = genomic DNA
ccgggccgtacgtgggggatggg

SEQ ID NO: 4234 - DNA, 23 bp, Homo sapiens
  source 1..23: mol_type = genomic DNA
ccgggccgtccgtgggggatggg

SEQ ID NO: 4235 - DNA, 23 bp, Homo sapiens
  source 1..23: mol_type = genomic DNA
ccgggcgccatggatagagcagg

SEQ ID NO: 4236 - DNA, 23 bp, Homo sapiens
  source 1..23: mol_type = genomic DNA
ccgggcgccgtggatagagcagg

SEQ ID NO: 4237 - DNA, 23 bp, Homo sapiens
  source 1..23: mol_type = genomic DNA
ccgggcgccgtgggtggagcagg

SEQ ID NO: 4238 - DNA, 23 bp, Homo sapiens
  source 1..23: mol_type = genomic DNA
ccgggcggggctcgggggactgg

SEQ ID NO: 4239 - DNA, 23 bp, Homo sapiens
  source 1..23: mol_type = genomic DNA
ccgggctgaccacgggggcgggg

SEQ ID NO: 4240 - DNA, 23 bp, Homo sapiens
  source 1..23: mol_type = genomic DNA
ccgggctgaccgcggggtccggg

SEQ ID NO: 4241 - DNA, 23 bp, Homo sapiens
  source 1..23: mol_type = genomic DNA
ccgggctgaccgcggggtcgggg

SEQ ID NO: 4242 - DNA, 23 bp, Homo sapiens
  source 1..23: mol_type = genomic DNA
ccgggctgacctcggggtccggg

SEQ ID NO: 4243 - DNA, 23 bp, Homo sapiens
  source 1..23: mol_type = genomic DNA
ccgggtcagggctgaggcttggg

SEQ ID NO: 4244 - DNA, 23 bp, Homo sapiens
  source 1..23: mol_type = genomic DNA
ccgggtcctgcgcccccgccagg

SEQ ID NO: 4245 - DNA, 23 bp, Homo sapiens
  source 1..23: mol_type = genomic DNA
ccgggtcctgcgcccccgccggg

SEQ ID NO: 4246 - DNA, 23 bp, Homo sapiens
  source 1..23: mol_type = genomic DNA
ccgggtcctgcgccctcgccggg

SEQ ID NO: 4247 - DNA, 23 bp, Homo sapiens
  source 1..23: mol_type = genomic DNA
ccgggtcctgcgtccccgccggg

SEQ ID NO: 4248 - DNA, 23 bp, Homo sapiens
  source 1..23: mol_type = genomic DNA
ccgggtcgcccacagtctccggg

SEQ ID NO: 4249 - DNA, 23 bp, Homo sapiens
  source 1..23: mol_type = genomic DNA
ccgggtcgccccaagtctcccgg

SEQ ID NO: 4250 - DNA, 23 bp, Homo sapiens
  source 1..23: mol_type = genomic DNA
ccgggtcgccccgagtctcccgg

SEQ ID NO: 4251 - DNA, 23 bp, Homo sapiens
  source 1..23: mol_type = genomic DNA
ccgggtcgccccgagtctccggg

SEQ ID NO: 4252 - DNA, 23 bp, Homo sapiens
  source 1..23: mol_type = genomic DNA
ccgggtcttgcgcccccgccagg

SEQ ID NO: 4253 - DNA, 23 bp, Homo sapiens
  source 1..23: mol_type = genomic DNA
ccgggtgggtcggggcggggcgg

SEQ ID NO: 4254 - DNA, 23 bp, Homo sapiens
  source 1..23: mol_type = genomic DNA
ccgggttggtcggggccggacgg

SEQ ID NO: 4255 - DNA, 23 bp, Homo sapiens
  source 1..23: mol_type = genomic DNA
ccgggttggtcggggccgggcgg

SEQ ID NO: 4256 - DNA, 23 bp, Homo sapiens
  source 1..23: mol_type = genomic DNA
ccgggttggtcggggcggggcgg

SEQ ID NO: 4257 - DNA, 23 bp, Homo sapiens
  source 1..23: mol_type = genomic DNA
ccgggttggtcggggctgggcgg

SEQ ID NO: 4258 - DNA, 23 bp, Homo sapiens
  source 1..23: mol_type = genomic DNA
ccggtctgagatccaccccgagg

SEQ ID NO: 4259 - DNA, 23 bp, Homo sapiens
  source 1..23: mol_type = genomic DNA
ccggtctgagatcctccccgagg

SEQ ID NO: 4260 - DNA, 23 bp, Homo sapiens
  source 1..23: mol_type = genomic DNA
ccggtgagtgaccccagcccggg

SEQ ID NO: 4261 - DNA, 23 bp, Homo sapiens
  source 1..23: mol_type = genomic DNA
ccggtgagtgaccccgcccgggg

SEQ ID NO: 4262 - DNA, 23 bp, Homo sapiens
  source 1..23: mol_type = genomic DNA
ccggtgagtgaccccggcccggg

SEQ ID NO: 4263 - DNA, 23 bp, Homo sapiens
  source 1..23: mol_type = genomic DNA
ccggtgagtgaccccggccgggg

SEQ ID NO: 4264 - DNA, 23 bp, Homo sapiens
  source 1..23: mol_type = genomic DNA
ccggtgagtgaccccggcctggg

SEQ ID NO: 4265 - DNA, 23 bp, Homo sapiens
  source 1..23: mol_type = genomic DNA
ccggtgagtgcgggatcgggagg

SEQ ID NO: 4266 - DNA, 23 bp, Homo sapiens
  source 1..23: mol_type = genomic DNA
ccggtgagtgcggggtcggcagg

SEQ ID NO: 4267 - DNA, 23 bp, Homo sapiens
  source 1..23: mol_type = genomic DNA
ccggtgagtgcggggtcgggagg

SEQ ID NO: 4268 - DNA, 23 bp, Homo sapiens
  source 1..23: mol_type = genomic DNA
ccggtgagtgcggggttgggagg

SEQ ID NO: 4269 - DNA, 23 bp, Homo sapiens
  source 1..23: mol_type = genomic DNA
ccggtgagtgcgggtcggcaggg

SEQ ID NO: 4270 - DNA, 23 bp, Homo sapiens
  source 1..23: mol_type = genomic DNA
ccggtgagtgcgggtcgggaggg

SEQ ID NO: 4271 - DNA, 23 bp, Homo sapiens
  source 1..23: mol_type = genomic DNA
ccgtccggccccgaccaacccgg

SEQ ID NO: 4272 - DNA, 23 bp, Homo sapiens
  source 1..23: mol_type = genomic DNA
ccgtccgtgggggatgaggaggg

SEQ ID NO: 4273 - DNA, 23 bp, Homo sapiens
  source 1..23: mol_type = genomic DNA
ccgtccgtgggggatggggaggg

SEQ ID NO: 4274 - DNA, 23 bp, Homo sapiens
  source 1..23: mol_type = genomic DNA
ccgtcctcctgctgctctggggg

SEQ ID NO: 4275 - DNA, 23 bp, Homo sapiens
  source 1..23: mol_type = genomic DNA
ccgtgtcccggcccggccgcggg

SEQ ID NO: 4276 - DNA, 23 bp, Homo sapiens
  source 1..23: mol_type = genomic DNA
ccgtgtcctggcccggccgcggg

SEQ ID NO: 4277 - DNA, 23 bp, Homo sapiens
  source 1..23: mol_type = genomic DNA
ccgttctcaggatggtcacatgg

SEQ ID NO: 4278 - DNA, 23 bp, Homo sapiens
  source 1..23: mol_type = genomic DNA
cctaaaccgaaaatgaaaccggg

SEQ ID NO: 4279 - DNA, 23 bp, Homo sapiens
  source 1..23: mol_type = genomic DNA
cctaaactgaaaatgaaaccggg

SEQ ID NO: 4280 - DNA, 23 bp, Homo sapiens
  source 1..23: mol_type = genomic DNA
cctaaggtctgtccttagcaggg

SEQ ID NO: 4281 - DNA, 23 bp, Homo sapiens
  source 1..23: mol_type = genomic DNA
cctaatgtgtgttgggtgttggg

SEQ ID NO: 4282 - DNA, 23 bp, Homo sapiens
  source 1..23: mol_type = genomic DNA
cctagctgtcctaggagctatgg

SEQ ID NO: 4283 - DNA, 23 bp, Homo sapiens
  source 1..23: mol_type = genomic DNA
cctagctgtcctaggagctgtgg

SEQ ID NO: 4284 - DNA, 23 bp, Homo sapiens
  source 1..23: mol_type = genomic DNA
cctagctgtccttggagctgtgg

SEQ ID NO: 4285 - DNA, 23 bp, Homo sapiens
  source 1..23: mol_type = genomic DNA
cctatctcctgtagatctcccgg

SEQ ID NO: 4286 - DNA, 23 bp, Homo sapiens
  source 1..23: mol_type = genomic DNA
cctatgaggggactgggaggagg

SEQ ID NO: 4287 - DNA, 23 bp, Homo sapiens
  source 1..23: mol_type = genomic DNA
cctcaactgaaaatgaaaccggg

SEQ ID NO: 4288 - DNA, 23 bp, Homo sapiens
  source 1..23: mol_type = genomic DNA
cctcacaagacagctgtctcagg

SEQ ID NO: 4289 - DNA, 23 bp, Homo sapiens
  source 1..23: mol_type = genomic DNA
cctcacactcagtgtgtttgggg

SEQ ID NO: 4290 - DNA, 23 bp, Homo sapiens
  source 1..23: mol_type = genomic DNA
cctcaccctgagatggagtaagg

SEQ ID NO: 4291 - DNA, 23 bp, Homo sapiens
  source 1..23: mol_type = genomic DNA
cctcaccctgagatggggtaagg

SEQ ID NO: 4292 - DNA, 23 bp, Homo sapiens
  source 1..23: mol_type = genomic DNA
cctcaccctgagctggggtaagg

SEQ ID NO: 4293 - DNA, 23 bp, Homo sapiens
  source 1..23: mol_type = genomic DNA
cctcagcctccactcaggtcagg

SEQ ID NO: 4294 - DNA, 23 bp, Homo sapiens
  source 1..23: mol_type = genomic DNA
cctcatggagtgagagcctgggg

SEQ ID NO: 4295 - DNA, 23 bp, Homo sapiens
  source 1..23: mol_type = genomic DNA
cctcatggagtgggagactgggg

SEQ ID NO: 4296 - DNA, 23 bp, Homo sapiens
  source 1..23: mol_type = genomic DNA
cctcatggagtgggagcctgggg

SEQ ID NO: 4297 - DNA, 23 bp, Homo sapiens
  source 1..23: mol_type = genomic DNA
cctcatggattgggagcctgggg

SEQ ID NO: 4298 - DNA, 23 bp, Homo sapiens
  source 1..23: mol_type = genomic DNA
cctcatggtcagagacagcgtgg

SEQ ID NO: 4299 - DNA, 23 bp, Homo sapiens
  source 1..23: mol_type = genomic DNA
cctcatggtcagagacgagatgg

SEQ ID NO: 4300 - DNA, 23 bp, Homo sapiens
  source 1..23: mol_type = genomic DNA
cctcatggtcagagacgggatgg

SEQ ID NO: 4301 - DNA, 23 bp, Homo sapiens
  source 1..23: mol_type = genomic DNA
cctcatggtcagagacggggtgg

SEQ ID NO: 4302 - DNA, 23 bp, Homo sapiens
  source 1..23: mol_type = genomic DNA
cctcatggtcagagagggggtgg

SEQ ID NO: 4303 - DNA, 23 bp, Homo sapiens
  source 1..23: mol_type = genomic DNA
cctcatggtcagagatgggatgg

SEQ ID NO: 4304 - DNA, 23 bp, Homo sapiens
  source 1..23: mol_type = genomic DNA
cctcatggtcagagatggggtgg

SEQ ID NO: 4305 - DNA, 23 bp, Homo sapiens
  source 1..23: mol_type = genomic DNA
cctcccaaccccgcactcacagg

SEQ ID NO: 4306 - DNA, 23 bp, Homo sapiens
  source 1..23: mol_type = genomic DNA
cctcccaaccccgcactcaccgg

SEQ ID NO: 4307 - DNA, 23 bp, Homo sapiens
  source 1..23: mol_type = genomic DNA
cctcccaacctcgcactcacagg

SEQ ID NO: 4308 - DNA, 23 bp, Homo sapiens
  source 1..23: mol_type = genomic DNA
cctcccgaccccgcactcaccgg

SEQ ID NO: 4309 - DNA, 23 bp, Homo sapiens
  source 1..23: mol_type = genomic DNA
cctcccgatcccgcactcaccgg

SEQ ID NO: 4310 - DNA, 23 bp, Homo sapiens
  source 1..23: mol_type = genomic DNA
cctcctaaccccgcactcacagg

SEQ ID NO: 4311 - DNA, 23 bp, Homo sapiens
  source 1..23: mol_type = genomic DNA
cctcctcacattaggctaacagg

SEQ ID NO: 4312 - DNA, 23 bp, Homo sapiens
  source 1..23: mol_type = genomic DNA
cctcctcacattatgctaacagg

SEQ ID NO: 4313 - DNA, 23 bp, Homo sapiens
  source 1..23: mol_type = genomic DNA
cctcctcccagtcccctcatagg

SEQ ID NO: 4314 - DNA, 23 bp, Homo sapiens
  source 1..23: mol_type = genomic DNA
cctcctccctgtcccctcacagg

SEQ ID NO: 4315 - DNA, 23 bp, Homo sapiens
  source 1..23: mol_type = genomic DNA
cctcctccgcgggtaccaccagg

SEQ ID NO: 4316 - DNA, 23 bp, Homo sapiens
  source 1..23: mol_type = genomic DNA
cctcctccgcgggtaccagcagg

SEQ ID NO: 4317 - DNA, 23 bp, Homo sapiens
  source 1..23: mol_type = genomic DNA
cctcctccgcgggtatgaccagg

SEQ ID NO: 4318 - DNA, 23 bp, Homo sapiens
  source 1..23: mol_type = genomic DNA
cctcctcctgctactctcggggg

SEQ ID NO: 4319 - DNA, 23 bp, Homo sapiens
  source 1..23: mol_type = genomic DNA
cctcctcctgctactcttggggg

SEQ ID NO: 4320 - DNA, 23 bp, Homo sapiens
  source 1..23: mol_type = genomic DNA
cctcctcctgctgctctgggggg

SEQ ID NO: 4321 - DNA, 23 bp, Homo sapiens
  source 1..23: mol_type = genomic DNA
cctcctgagatctgtcgtcaggg

SEQ ID NO: 4322 - DNA, 23 bp, Homo sapiens
  source 1..23: mol_type = genomic DNA
cctcctgaggtctgtcctcaggg

SEQ ID NO: 4323 - DNA, 23 bp, Homo sapiens
  source 1..23: mol_type = genomic DNA
cctcgaccggcgagagccccagg

SEQ ID NO: 4324 - DNA, 23 bp, Homo sapiens
  source 1..23: mol_type = genomic DNA
cctcgatggttgtggtgttgggg

SEQ ID NO: 4325 - DNA, 23 bp, Homo sapiens
  source 1..23: mol_type = genomic DNA
cctcgctctggttgtagtagcgg

SEQ ID NO: 4326 - DNA, 23 bp, Homo sapiens
  source 1..23: mol_type = genomic DNA
cctcggggaggatctcagaccgg

SEQ ID NO: 4327 - DNA, 23 bp, Homo sapiens
  source 1..23: mol_type = genomic DNA
cctcggggtggatctcagaccgg

SEQ ID NO: 4328 - DNA, 23 bp, Homo sapiens
  source 1..23: mol_type = genomic DNA
cctcggggtggatctcagacggg

SEQ ID NO: 4329 - DNA, 23 bp, Homo sapiens
  source 1..23: mol_type = genomic DNA
cctcgtcctgctactctcggggg

SEQ ID NO: 4330 - DNA, 23 bp, Homo sapiens
  source 1..23: mol_type = genomic DNA
cctctagccacatcttctgtggg

SEQ ID NO: 4331 - DNA, 23 bp, Homo sapiens
  source 1..23: mol_type = genomic DNA
cctctagccacatgttctgtggg

SEQ ID NO: 4332 - DNA, 23 bp, Homo sapiens
  source 1..23: mol_type = genomic DNA
cctctaggaccttaaggccctgg

SEQ ID NO: 4333 - DNA, 23 bp, Homo sapiens
  source 1..23: mol_type = genomic DNA
cctctctggagacctttagcagg

SEQ ID NO: 4334 - DNA, 23 bp, Homo sapiens
  source 1..23: mol_type = genomic DNA
cctctgccgggaggagcgagggg

SEQ ID NO: 4335 - DNA, 23 bp, Homo sapiens
  source 1..23: mol_type = genomic DNA
cctctgcggagaggagcgagggg

SEQ ID NO: 4336 - DNA, 23 bp, Homo sapiens
  source 1..23: mol_type = genomic DNA
cctctgcggggagaagcaagggg

SEQ ID NO: 4337 - DNA, 23 bp, Homo sapiens
  source 1..23: mol_type = genomic DNA
cctctggggagaggagcgagggg

SEQ ID NO: 4338 - DNA, 23 bp, Homo sapiens
  source 1..23: mol_type = genomic DNA
cctctgtagggaggagcaagggg

SEQ ID NO: 4339 - DNA, 23 bp, Homo sapiens
  source 1..23: mol_type = genomic DNA
cctctgtggggagaagcaacggg

SEQ ID NO: 4340 - DNA, 23 bp, Homo sapiens
  source 1..23: mol_type = genomic DNA
cctctgtggggagaagcaagggg

SEQ ID NO: 4341 - DNA, 23 bp, Homo sapiens
  source 1..23: mol_type = genomic DNA
cctctgtggggaggagagagggg

SEQ ID NO: 4342 - DNA, 23 bp, Homo sapiens
  source 1..23: mol_type = genomic DNA
cctctgtggggaggagcgagggg

SEQ ID NO: 4343 - DNA, 23 bp, Homo sapiens
  source 1..23: mol_type = genomic DNA
cctgaccacagctgccgcagtgg

SEQ ID NO: 4344 - DNA, 23 bp, Homo sapiens
  source 1..23: mol_type = genomic DNA
cctgaccacagctgctgcagtgg

SEQ ID NO: 4345 - DNA, 23 bp, Homo sapiens
  source 1..23: mol_type = genomic DNA
cctgacctgagtggaggctgagg

SEQ ID NO: 4346 - DNA, 23 bp, Homo sapiens
  source 1..23: mol_type = genomic DNA
cctgacctgcgcccccggccggg

SEQ ID NO: 4347 - DNA, 23 bp, Homo sapiens
  source 1..23: mol_type = genomic DNA
cctgacgacagatctcaggaggg

SEQ ID NO: 4348 - DNA, 23 bp, Homo sapiens
  source 1..23: mol_type = genomic DNA
cctgagacagctgcctgtgtggg

SEQ ID NO: 4349 - DNA, 23 bp, Homo sapiens
  source 1..23: mol_type = genomic DNA
cctgagacagctgtcttgtgagg

SEQ ID NO: 4350 - DNA, 23 bp, Homo sapiens
  source 1..23: mol_type = genomic DNA
cctgagatggagtaaggaggggg

SEQ ID NO: 4351 - DNA, 23 bp, Homo sapiens
  source 1..23: mol_type = genomic DNA
cctgagatggggtaaggaggggg

SEQ ID NO: 4352 - DNA, 23 bp, Homo sapiens
  source 1..23: mol_type = genomic DNA
cctgagctcctggaccgccgcgg

SEQ ID NO: 4353 - DNA, 23 bp, Homo sapiens
  source 1..23: mol_type = genomic DNA
cctgagctcctggaccgcggcgg

SEQ ID NO: 4354 - DNA, 23 bp, Homo sapiens
  source 1..23: mol_type = genomic DNA
cctgaggacagacctcaggaggg

SEQ ID NO: 4355 - DNA, 23 bp, Homo sapiens
  source 1..23: mol_type = genomic DNA
cctgaggaccttcaggagggcgg

SEQ ID NO: 4356 - DNA, 23 bp, Homo sapiens
  source 1..23: mol_type = genomic DNA
cctgatgtgtgttgggtgttggg

SEQ ID NO: 4357 - DNA, 23 bp, Homo sapiens
  source 1..23: mol_type = genomic DNA
cctgcagacacggaatgtgaagg

SEQ ID NO: 4358 - DNA, 23 bp, Homo sapiens
  source 1..23: mol_type = genomic DNA
cctgcatctcagtcccacacagg

SEQ ID NO: 4359 - DNA, 23 bp, Homo sapiens
  source 1..23: mol_type = genomic DNA
cctgccgaccccgcactcaccgg

SEQ ID NO: 4360 - DNA, 23 bp, Homo sapiens
  source 1..23: mol_type = genomic DNA
cctgcgctcctggaccgccgcgg

SEQ ID NO: 4361 - DNA, 23 bp, Homo sapiens
  source 1..23: mol_type = genomic DNA
cctgcgctcctggaccgcggcgg

SEQ ID NO: 4362 - DNA, 23 bp, Homo sapiens
  source 1..23: mol_type = genomic DNA
cctgcgctcctggaccgctgcgg

SEQ ID NO: 4363 - DNA, 23 bp, Homo sapiens
  source 1..23: mol_type = genomic DNA
cctgcgctcctggactgccgcgg

SEQ ID NO: 4364 - DNA, 23 bp, Homo sapiens
  source 1..23: mol_type = genomic DNA
cctgcgctcttggaccgcggcgg

SEQ ID NO: 4365 - DNA, 23 bp, Homo sapiens
  source 1..23: mol_type = genomic DNA
cctgcgtccaggctggtgtctgg

SEQ ID NO: 4366 - DNA, 23 bp, Homo sapiens
  source 1..23: mol_type = genomic DNA
cctgctaaaggtctccagagagg

SEQ ID NO: 4367 - DNA, 23 bp, Homo sapiens
  source 1..23: mol_type = genomic DNA
cctgctactctcgggggccctgg

SEQ ID NO: 4368 - DNA, 23 bp, Homo sapiens
  source 1..23: mol_type = genomic DNA
cctgctactctcgggggctctgg

SEQ ID NO: 4369 - DNA, 23 bp, Homo sapiens
  source 1..23: mol_type = genomic DNA
cctgctactcttgggggccctgg

SEQ ID NO: 4370 - DNA, 23 bp, Homo sapiens
  source 1..23: mol_type = genomic DNA
cctgctccacccacggcgcccgg

SEQ ID NO: 4371 - DNA, 23 bp, Homo sapiens
  source 1..23: mol_type = genomic DNA
cctgctctatccacggcgcccgg

SEQ ID NO: 4372 - DNA, 23 bp, Homo sapiens
  source 1..23: mol_type = genomic DNA
cctgctctatccatggcgcccgg

SEQ ID NO: 4373 - DNA, 23 bp, Homo sapiens
  source 1..23: mol_type = genomic DNA
cctgctctctgacacaattaagg

SEQ ID NO: 4374 - DNA, 23 bp, Homo sapiens
  source 1..23: mol_type = genomic DNA
cctgctctctgactcaattaagg

SEQ ID NO: 4375 - DNA, 23 bp, Homo sapiens
  source 1..23: mol_type = genomic DNA
cctgctctgtgacacaattaagg

SEQ ID NO: 4376 - DNA, 23 bp, Homo sapiens
  source 1..23: mol_type = genomic DNA
cctgctgaagggctccagaaggg

SEQ ID NO: 4377 - DNA, 23 bp, Homo sapiens
  source 1..23: mol_type = genomic DNA
cctgctgctctcggcggccctgg

SEQ ID NO: 4378 - DNA, 23 bp, Homo sapiens
  source 1..23: mol_type = genomic DNA
cctgctgctctcgggagccctgg

SEQ ID NO: 4379 - DNA, 23 bp, Homo sapiens
  source 1..23: mol_type = genomic DNA
cctgctgctctcgggaggcctgg

SEQ ID NO: 4380 - DNA, 23 bp, Homo sapiens
  source 1..23: mol_type = genomic DNA
cctgctgctctcgggagtcctgg

SEQ ID NO: 4381 - DNA, 23 bp, Homo sapiens
  source 1..23: mol_type = genomic DNA
cctgctgctctggggggcagtgg

SEQ ID NO: 4382 - DNA, 23 bp, Homo sapiens
  source 1..23: mol_type = genomic DNA
cctgctgctctggggggccctgg

SEQ ID NO: 4383 - DNA, 23 bp, Homo sapiens
  source 1..23: mol_type = genomic DNA
cctgctggtacccgcggaggagg

SEQ ID NO: 4384 - DNA, 23 bp, Homo sapiens
  source 1..23: mol_type = genomic DNA
cctggccctgacccagaccaggg

SEQ ID NO: 4385 - DNA, 23 bp, Homo sapiens
  source 1..23: mol_type = genomic DNA
cctggccctgacccagacctggg

SEQ ID NO: 4386 - DNA, 23 bp, Homo sapiens
  source 1..23: mol_type = genomic DNA
cctggccctgaccgagacctggg

SEQ ID NO: 4387 - DNA, 23 bp, Homo sapiens
  source 1..23: mol_type = genomic DNA
cctggccctgatcgagacctggg

SEQ ID NO: 4388 - DNA, 23 bp, Homo sapiens
  source 1..23: mol_type = genomic DNA
cctggcgggggcgcaagacccgg

SEQ ID NO: 4389 - DNA, 23 bp, Homo sapiens
  source 1..23: mol_type = genomic DNA
cctggcgggggcgcaggacccgg

SEQ ID NO: 4390 - DNA, 23 bp, Homo sapiens
  source 1..23: mol_type = genomic DNA
cctggcgggggcgcaggaccggg

SEQ ID NO: 4391 - DNA, 23 bp, Homo sapiens
  source 1..23: mol_type = genomic DNA
cctggctgtcctagcagttgtgg

SEQ ID NO: 4392 - DNA, 23 bp, Homo sapiens
  source 1..23: mol_type = genomic DNA
cctggctgtcctggctgtcctgg

SEQ ID NO: 4393 - DNA, 23 bp, Homo sapiens
  source 1..23: mol_type = genomic DNA
cctgggcactgtcactgcctggg

SEQ ID NO: 4394 - DNA, 23 bp, Homo sapiens
  source 1..23: mol_type = genomic DNA
cctgggcactgttgctgcctggg

SEQ ID NO: 4395 - DNA, 23 bp, Homo sapiens
  source 1..23: mol_type = genomic DNA
cctgggcactgttgctggctggg

SEQ ID NO: 4396 - DNA, 23 bp, Homo sapiens
  source 1..23: mol_type = genomic DNA
cctgggcctctcccgggacaagg

SEQ ID NO: 4397 - DNA, 23 bp, Homo sapiens
  source 1..23: mol_type = genomic DNA
cctgggcctctcccggggcaagg

SEQ ID NO: 4398 - DNA, 23 bp, Homo sapiens
  source 1..23: mol_type = genomic DNA
cctgggcctctcccgggtcaagg

SEQ ID NO: 4399 - DNA, 23 bp, Homo sapiens
  source 1..23: mol_type = genomic DNA
cctggggctctcgccggtcgagg

SEQ ID NO: 4400 - DNA, 23 bp, Homo sapiens
  source 1..23: mol_type = genomic DNA
cctggtcatacccgcggaggagg

SEQ ID NO: 4401 - DNA, 23 bp, Homo sapiens
  source 1..23: mol_type = genomic DNA
cctggtctgggtcagggccaggg

SEQ ID NO: 4402 - DNA, 23 bp, Homo sapiens
  source 1..23: mol_type = genomic DNA
cctggtggtacccgcggaggagg

SEQ ID NO: 4403 - DNA, 23 bp, Homo sapiens
  source 1..23: mol_type = genomic DNA
cctgtgaggggacagggaggagg

SEQ ID NO: 4404 - DNA, 23 bp, Homo sapiens
  source 1..23: mol_type = genomic DNA
cctgtgagtgcgaggttgggagg

SEQ ID NO: 4405 - DNA, 23 bp, Homo sapiens
  source 1..23: mol_type = genomic DNA
cctgtgagtgcggggttaggagg

SEQ ID NO: 4406 - DNA, 23 bp, Homo sapiens
  source 1..23: mol_type = genomic DNA
cctgtgagtgcggggttgggagg

SEQ ID NO: 4407 - DNA, 23 bp, Homo sapiens
  source 1..23: mol_type = genomic DNA
cctgtgtccaggctggcgtctgg

SEQ ID NO: 4408 - DNA, 23 bp, Homo sapiens
  source 1..23: mol_type = genomic DNA
cctgtgtccaggctggtgtctgg

SEQ ID NO: 4409 - DNA, 23 bp, Homo sapiens
  source 1..23: mol_type = genomic DNA
cctgtgtgggactgagatgcagg

SEQ ID NO: 4410 - DNA, 23 bp, Homo sapiens
  source 1..23: mol_type = genomic DNA
cctgttagcataatgtgaggagg

SEQ ID NO: 4411 - DNA, 23 bp, Homo sapiens
  source 1..23: mol_type = genomic DNA
cctgttagcctaatgtgaggagg

SEQ ID NO: 4412 - DNA, 23 bp, Homo sapiens
  source 1..23: mol_type = genomic DNA
ccttaattgagtcagagagcagg

SEQ ID NO: 4413 - DNA, 23 bp, Homo sapiens
  source 1..23: mol_type = genomic DNA
ccttaattgtgtcacagagcagg

SEQ ID NO: 4414 - DNA, 23 bp, Homo sapiens
  source 1..23: mol_type = genomic DNA
ccttaattgtgtcagagagcagg

SEQ ID NO: 4415 - DNA, 23 bp, Homo sapiens
  source 1..23: mol_type = genomic DNA
ccttaccccagctcagggtgagg

SEQ ID NO: 4416 - DNA, 23 bp, Homo sapiens
  source 1..23: mol_type = genomic DNA
ccttaccccatctcagggtgagg

SEQ ID NO: 4417 - DNA, 23 bp, Homo sapiens
  source 1..23: mol_type = genomic DNA
ccttactccatctcagggtgagg

SEQ ID NO: 4418 - DNA, 23 bp, Homo sapiens
  source 1..23: mol_type = genomic DNA
ccttcacattccgtgtctcctgg

SEQ ID NO: 4419 - DNA, 23 bp, Homo sapiens
  source 1..23: mol_type = genomic DNA
ccttcacattccgtgtctgcagg

SEQ ID NO: 4420 - DNA, 23 bp, Homo sapiens
  source 1..23: mol_type = genomic DNA
ccttcacattccgtgtgttccgg

SEQ ID NO: 4421 - DNA, 23 bp, Homo sapiens
  source 1..23: mol_type = genomic DNA
ccttcactttccgtgtgttccgg

SEQ ID NO: 4422 - DNA, 23 bp, Homo sapiens
  source 1..23: mol_type = genomic DNA
ccttcatattccgtgtctcctgg

SEQ ID NO: 4423 - DNA, 23 bp, Homo sapiens
  source 1..23: mol_type = genomic DNA
ccttcatgttccgtgtctcccgg

SEQ ID NO: 4424 - DNA, 23 bp, Homo sapiens
  source 1..23: mol_type = genomic DNA
ccttctggagcccttcagcaggg

SEQ ID NO: 4425 - DNA, 23 bp, Homo sapiens
  source 1..23: mol_type = genomic DNA
ccttctggagcccttcagccggg

SEQ ID NO: 4426 - DNA, 23 bp, Homo sapiens
  source 1..23: mol_type = genomic DNA
ccttgacccgggagaggcccagg

SEQ ID NO: 4427 - DNA, 23 bp, Homo sapiens
  source 1..23: mol_type = genomic DNA
ccttgatgattatggtgttgggg

SEQ ID NO: 4428 - DNA, 23 bp, Homo sapiens
  source 1..23: mol_type = genomic DNA
ccttgatggttgtggtgttgggg

SEQ ID NO: 4429 - DNA, 23 bp, Homo sapiens
  source 1..23: mol_type = genomic DNA
ccttgcagatctgtgtctcccgg

SEQ ID NO: 4430 - DNA, 23 bp, Homo sapiens
  source 1..23: mol_type = genomic DNA
ccttgccccgggagaggcccagg

SEQ ID NO: 4431 - DNA, 23 bp, Homo sapiens
  source 1..23: mol_type = genomic DNA
ccttgccgtcgtaggcgaactgg

SEQ ID NO: 4432 - DNA, 23 bp, Homo sapiens
  source 1..23: mol_type = genomic DNA
ccttgccgtcgtaggcggactgg

SEQ ID NO: 4433 - DNA, 23 bp, Homo sapiens
  source 1..23: mol_type = genomic DNA
ccttgccgtcgtaggcgtactgg

SEQ ID NO: 4434 - DNA, 23 bp, Homo sapiens
  source 1..23: mol_type = genomic DNA
ccttgccgtcgtaggcgtcctgg

SEQ ID NO: 4435 - DNA, 23 bp, Homo sapiens
  source 1..23: mol_type = genomic DNA
ccttgccgtcgtaggctaactgg

SEQ ID NO: 4436 - DNA, 23 bp, Homo sapiens
  source 1..23: mol_type = genomic DNA
ccttggggtggatctcagacggg

SEQ ID NO: 4437 - DNA, 23 bp, Homo sapiens
  source 1..23: mol_type = genomic DNA
ccttggtggttgtggtgttgggg

SEQ ID NO: 4438 - DNA, 23 bp, Homo sapiens
  source 1..23: mol_type = genomic DNA
ccttgtagatctgtgtgttccgg

SEQ ID NO: 4439 - DNA, 23 bp, Homo sapiens
  source 1..23: mol_type = genomic DNA
ccttgtcccgggagaggcccagg

SEQ ID NO: 4440 - DNA, 23 bp, Homo sapiens
  source 1..23: mol_type = genomic DNA
cctttacccggtttcattttcgg

SEQ ID NO: 4441 - DNA, 23 bp, Homo sapiens
  source 1..23: mol_type = genomic DNA
cctttgcagaaacaaagtcaggg

SEQ ID NO: 4442 - DNA, 23 bp, Homo sapiens
  source 1..23: mol_type = genomic DNA
cgaactggtcatacccgcggagg

SEQ ID NO: 4443 - DNA, 23 bp, Homo sapiens
  source 1..23: mol_type = genomic DNA
cgaactggtcatgcccgcggagg

SEQ ID NO: 4444 - DNA, 23 bp, Homo sapiens
  source 1..23: mol_type = genomic DNA
cgaactggttatacccgcggagg

SEQ ID NO: 4445 - DNA, 23 bp, Homo sapiens
  source 1..23: mol_type = genomic DNA
cgaactggttatgcccgcggagg

SEQ ID NO: 4446 - DNA, 23 bp, Homo sapiens
  source 1..23: mol_type = genomic DNA
cgaagcccctcaccctgagatgg

SEQ ID NO: 4447 - DNA, 23 bp, Homo sapiens
  source 1..23: mol_type = genomic DNA
cgaaggcggtatatggattgggg

SEQ ID NO: 4448 - DNA, 23 bp, Homo sapiens
  source 1..23: mol_type = genomic DNA
cgaaggcggtgtatggattgggg

SEQ ID NO: 4449 - DNA, 23 bp, Homo sapiens
  source 1..23: mol_type = genomic DNA
cgaagtcccaggccccgggcggg

SEQ ID NO: 4450 - DNA, 23 bp, Homo sapiens
  source 1..23: mol_type = genomic DNA
cgaagtcccaggtcccggacggg

SEQ ID NO: 4451 - DNA, 23 bp, Homo sapiens
  source 1..23: mol_type = genomic DNA
cgaagtcccaggtcccgggcggg

SEQ ID NO: 4452 - DNA, 23 bp, Homo sapiens
  source 1..23: mol_type = genomic DNA
cgaagtcccatgtcccggacggg

SEQ ID NO: 4453 - DNA, 23 bp, Homo sapiens
  source 1..23: mol_type = genomic DNA
cgaccaacccgcggggattttgg

SEQ ID NO: 4454 - DNA, 23 bp, Homo sapiens
  source 1..23: mol_type = genomic DNA
cgacccctccccatcccccacgg

SEQ ID NO: 4455 - DNA, 23 bp, Homo sapiens
  source 1..23: mol_type = genomic DNA
cgacccctcctcatcccccacgg

SEQ ID NO: 4456 - DNA, 23 bp, Homo sapiens
  source 1..23: mol_type = genomic DNA
cgacccgcactcaccggcccagg

SEQ ID NO: 4457 - DNA, 23 bp, Homo sapiens
  source 1..23: mol_type = genomic DNA
cgacctataggagatggggaagg

SEQ ID NO: 4458 - DNA, 23 bp, Homo sapiens
  source 1..23: mol_type = genomic DNA
cgacctctccccatcccccacgg

SEQ ID NO: 4459 - DNA, 23 bp, Homo sapiens
  source 1..23: mol_type = genomic DNA
cgacgccacgagtccgaggaagg

SEQ ID NO: 4460 - DNA, 23 bp, Homo sapiens
  source 1..23: mol_type = genomic DNA
cgacgccacgagtccgaggatgg

SEQ ID NO: 4461 - DNA, 23 bp, Homo sapiens
  source 1..23: mol_type = genomic DNA
cgacgccgcgagccagaagatgg

SEQ ID NO: 4462 - DNA, 23 bp, Homo sapiens
  source 1..23: mol_type = genomic DNA
cgacgccgcgagccagaggatgg

SEQ ID NO: 4463 - DNA, 23 bp, Homo sapiens
  source 1..23: mol_type = genomic DNA
cgacgccgcgagccggaggatgg

SEQ ID NO: 4464 - DNA, 23 bp, Homo sapiens
  source 1..23: mol_type = genomic DNA
cgacgccgcgagtccaagagggg

SEQ ID NO: 4465 - DNA, 23 bp, Homo sapiens
  source 1..23: mol_type = genomic DNA
cgacgccgcgagtccgagagagg

SEQ ID NO: 4466 - DNA, 23 bp, Homo sapiens
  source 1..23: mol_type = genomic DNA
cgacgccgcgagtccgagagggg

SEQ ID NO: 4467 - DNA, 23 bp, Homo sapiens
  source 1..23: mol_type = genomic DNA
cgacgccgcgagtccgaggaagg

SEQ ID NO: 4468 - DNA, 23 bp, Homo sapiens
  source 1..23: mol_type = genomic DNA
cgacgccgcgagtccgaggacgg

SEQ ID NO: 4469 - DNA, 23 bp, Homo sapiens
  source 1..23: mol_type = genomic DNA
cgacgccgcgagtccgaggatgg

SEQ ID NO: 4470 - DNA, 23 bp, Homo sapiens
  source 1..23: mol_type = genomic DNA
cgagacccttgacccgggagagg

SEQ ID NO: 4471 - DNA, 23 bp, Homo sapiens
  source 1..23: mol_type = genomic DNA
cgagacccttgccccgggagagg

SEQ ID NO: 4472 - DNA, 23 bp, Homo sapiens
  source 1..23: mol_type = genomic DNA
cgagacccttgtcccgggagagg

SEQ ID NO: 4473 - DNA, 23 bp, Homo sapiens
  source 1..23: mol_type = genomic DNA
cgagagccttgtctgcattgggg

SEQ ID NO: 4474 - DNA, 23 bp, Homo sapiens
  source 1..23: mol_type = genomic DNA
cgagatccaccccgaagccgcgg

SEQ ID NO: 4475 - DNA, 23 bp, Homo sapiens
  source 1..23: mol_type = genomic DNA
cgagatccgccccgaagccgcgg

SEQ ID NO: 4476 - DNA, 23 bp, Homo sapiens
  source 1..23: mol_type = genomic DNA
cgagccagaagatggagccgcgg

SEQ ID NO: 4477 - DNA, 23 bp, Homo sapiens
  source 1..23: mol_type = genomic DNA
cgagccagaggatggagccgcgg

SEQ ID NO: 4478 - DNA, 23 bp, Homo sapiens
  source 1..23: mol_type = genomic DNA
cgagcccctcaccctgagatggg

SEQ ID NO: 4479 - DNA, 23 bp, Homo sapiens
  source 1..23: mol_type = genomic DNA
cgagccggaggatggagccgcgg

SEQ ID NO: 4480 - DNA, 23 bp, Homo sapiens
  source 1..23: mol_type = genomic DNA
cgagctccgtgtcctgggtctgg

SEQ ID NO: 4481 - DNA, 23 bp, Homo sapiens
  source 1..23: mol_type = genomic DNA
cgaggagacacggaatgtgaagg

SEQ ID NO: 4482 - DNA, 23 bp, Homo sapiens
  source 1..23: mol_type = genomic DNA
cgaggagacagggaaagtgaagg

SEQ ID NO: 4483 - DNA, 23 bp, Homo sapiens
  source 1..23: mol_type = genomic DNA
cgagggccgcgtctgcaatgggg

SEQ ID NO: 4484 - DNA, 23 bp, Homo sapiens
  source 1..23: mol_type = genomic DNA
cgagggccgcgtctgcattgggg

SEQ ID NO: 4485 - DNA, 23 bp, Homo sapiens
  source 1..23: mol_type = genomic DNA
cgagtccaagaggggagccgcgg

SEQ ID NO: 4486 - DNA, 23 bp, Homo sapiens
  source 1..23: mol_type = genomic DNA
cgagtccgagagaggagccgcgg

SEQ ID NO: 4487 - DNA, 23 bp, Homo sapiens
  source 1..23: mol_type = genomic DNA
cgagtccgagaggggagccccgg

SEQ ID NO: 4488 - DNA, 23 bp, Homo sapiens
  source 1..23: mol_type = genomic DNA
cgagtccgagaggggagccgcgg

SEQ ID NO: 4489 - DNA, 23 bp, Homo sapiens
  source 1..23: mol_type = genomic DNA
cgagtccgaggaaggagccgcgg

SEQ ID NO: 4490 - DNA, 23 bp, Homo sapiens
  source 1..23: mol_type = genomic DNA
cgagtccgaggacggagccccgg

SEQ ID NO: 4491 - DNA, 23 bp, Homo sapiens
  source 1..23: mol_type = genomic DNA
cgagtccgaggatggcgccccgg

SEQ ID NO: 4492 - DNA, 23 bp, Homo sapiens
  source 1..23: mol_type = genomic DNA
cgagtccgggtgggtgactgggg

SEQ ID NO: 4493 - DNA, 23 bp, Homo sapiens
  source 1..23: mol_type = genomic DNA
cgagtctctgagcggggaacagg

SEQ ID NO: 4494 - DNA, 23 bp, Homo sapiens
  source 1..23: mol_type = genomic DNA
cgagtctctgagtggggaacagg

SEQ ID NO: 4495 - DNA, 23 bp, Homo sapiens
  source 1..23: mol_type = genomic DNA
cgatgaagcggggctccccgcgg

SEQ ID NO: 4496 - DNA, 23 bp, Homo sapiens
  source 1..23: mol_type = genomic DNA
cgatgaagcggggctctccgcgg

SEQ ID NO: 4497 - DNA, 23 bp, Homo sapiens
  source 1..23: mol_type = genomic DNA
cgatgaagcggggcttcccgcgg

SEQ ID NO: 4498 - DNA, 23 bp, Homo sapiens
  source 1..23: mol_type = genomic DNA
cgatgaagtggggctccccgcgg

SEQ ID NO: 4499 - DNA, 23 bp, Homo sapiens
  source 1..23: mol_type = genomic DNA
cgatgaagtggggctctccgcgg

SEQ ID NO: 4500 - DNA, 23 bp, Homo sapiens
  source 1..23: mol_type = genomic DNA
cgatgtacggctgcgacgtgggg

SEQ ID NO: 4501 - DNA, 23 bp, Homo sapiens
  source 1..23: mol_type = genomic DNA
cgatgtatggctgcgacctgggg

SEQ ID NO: 4502 - DNA, 23 bp, Homo sapiens
  source 1..23: mol_type = genomic DNA
cgatgtatggctgcgacgtgggg

SEQ ID NO: 4503 - DNA, 23 bp, Homo sapiens
  source 1..23: mol_type = genomic DNA
cgcacgggtaccaggggccacgg

SEQ ID NO: 4504 - DNA, 23 bp, Homo sapiens
  source 1..23: mol_type = genomic DNA
cgcacgggtaccgggggccacgg

SEQ ID NO: 4505 - DNA, 23 bp, Homo sapiens
  source 1..23: mol_type = genomic DNA
cgcactcacccgcccaggtctgg

SEQ ID NO: 4506 - DNA, 23 bp, Homo sapiens
  source 1..23: mol_type = genomic DNA
cgcactcacccgccctggtctgg

SEQ ID NO: 4507 - DNA, 23 bp, Homo sapiens
  source 1..23: mol_type = genomic DNA
cgcactcacctgcccaggtctgg

SEQ ID NO: 4508 - DNA, 23 bp, Homo sapiens
  source 1..23: mol_type = genomic DNA
cgcagccaaacatcatctggagg

SEQ ID NO: 4509 - DNA, 23 bp, Homo sapiens
  source 1..23: mol_type = genomic DNA
cgcagccaaacatccactggagg

SEQ ID NO: 4510 - DNA, 23 bp, Homo sapiens
  source 1..23: mol_type = genomic DNA
cgcagccaaacatcctctggagg

SEQ ID NO: 4511 - DNA, 23 bp, Homo sapiens
  source 1..23: mol_type = genomic DNA
cgcagccacacatccactggagg

SEQ ID NO: 4512 - DNA, 23 bp, Homo sapiens
  source 1..23: mol_type = genomic DNA
cgcagccagacatcctctggagg

SEQ ID NO: 4513 - DNA, 23 bp, Homo sapiens
  source 1..23: mol_type = genomic DNA
cgcagccatacatattctggagg

SEQ ID NO: 4514 - DNA, 23 bp, Homo sapiens
  source 1..23: mol_type = genomic DNA
cgcagccatacatccactggagg

SEQ ID NO: 4515 - DNA, 23 bp, Homo sapiens
  source 1..23: mol_type = genomic DNA
cgcagccatacatcctctggagg

SEQ ID NO: 4516 - DNA, 23 bp, Homo sapiens
  source 1..23: mol_type = genomic DNA
cgcagccgtacatccactggagg

SEQ ID NO: 4517 - DNA, 23 bp, Homo sapiens
  source 1..23: mol_type = genomic DNA
cgcagccgtacatcctctggagg

SEQ ID NO: 4518 - DNA, 23 bp, Homo sapiens
  source 1..23: mol_type = genomic DNA
cgcagccgtacatgctctggagg

SEQ ID NO: 4519 - DNA, 23 bp, Homo sapiens
  source 1..23: mol_type = genomic DNA
cgcaggagacgtgggacaggagg

SEQ ID NO: 4520 - DNA, 23 bp, Homo sapiens
  source 1..23: mol_type = genomic DNA
cgcaggagatgtgggacaagagg

SEQ ID NO: 4521 - DNA, 23 bp, Homo sapiens
  source 1..23: mol_type = genomic DNA
cgcagggaggagggtcgggcggg

SEQ ID NO: 4522 - DNA, 23 bp, Homo sapiens
  source 1..23: mol_type = genomic DNA
cgcagggaggtgggtcgggcggg

SEQ ID NO: 4523 - DNA, 23 bp, Homo sapiens
  source 1..23: mol_type = genomic DNA
cgcaggtaccaggggcagtgggg

SEQ ID NO: 4524 - DNA, 23 bp, Homo sapiens
  source 1..23: mol_type = genomic DNA
cgcatgctcaatacatccaatgg

SEQ ID NO: 4525 - DNA, 23 bp, Homo sapiens
  source 1..23: mol_type = genomic DNA
cgccatgacggccatcctcgggg

SEQ ID NO: 4526 - DNA, 23 bp, Homo sapiens
  source 1..23: mol_type = genomic DNA
cgccatggatagagcaagagggg

SEQ ID NO: 4527 - DNA, 23 bp, Homo sapiens
  source 1..23: mol_type = genomic DNA
cgccatggatagagcaggagggg

SEQ ID NO: 4528 - DNA, 23 bp, Homo sapiens
  source 1..23: mol_type = genomic DNA
cgcccaacccgcggggattttgg

SEQ ID NO: 4529 - DNA, 23 bp, Homo sapiens
  source 1..23: mol_type = genomic DNA
cgcccagccccgaccaacccggg

SEQ ID NO: 4530 - DNA, 23 bp, Homo sapiens
  source 1..23: mol_type = genomic DNA
cgccccgccccgaccaacccggg

SEQ ID NO: 4531 - DNA, 23 bp, Homo sapiens
  source 1..23: mol_type = genomic DNA
cgccccgccccgaccaacctggg

SEQ ID NO: 4532 - DNA, 23 bp, Homo sapiens
  source 1..23: mol_type = genomic DNA
cgccccgccccgacccacccggg

SEQ ID NO: 4533 - DNA, 23 bp, Homo sapiens
  source 1..23: mol_type = genomic DNA
cgcccggccccgaccaacccggg

SEQ ID NO: 4534 - DNA, 23 bp, Homo sapiens
  source 1..23: mol_type = genomic DNA
cgccctccctctggtcctgaggg

SEQ ID NO: 4535 - DNA, 23 bp, Homo sapiens
  source 1..23: mol_type = genomic DNA
cgccctcctgaaggtcctcaggg

SEQ ID NO: 4536 - DNA, 23 bp, Homo sapiens
  source 1..23: mol_type = genomic DNA
cgccgagagcagcaggaggacgg

SEQ ID NO: 4537 - DNA, 23 bp, Homo sapiens
  source 1..23: mol_type = genomic DNA
cgccgggacgagggtcgggcagg

SEQ ID NO: 4538 - DNA, 23 bp, Homo sapiens
  source 1..23: mol_type = genomic DNA
cgccgggaggagggtcgggcagg

SEQ ID NO: 4539 - DNA, 23 bp, Homo sapiens
  source 1..23: mol_type = genomic DNA
cgccgggaggagggtcgggcggg

SEQ ID NO: 4540 - DNA, 23 bp, Homo sapiens
  source 1..23: mol_type = genomic DNA
cgccgggaggagggtcgggtggg

SEQ ID NO: 4541 - DNA, 23 bp, Homo sapiens
  source 1..23: mol_type = genomic DNA
cgccgggaggagggtcggtcagg

SEQ ID NO: 4542 - DNA, 23 bp, Homo sapiens
  source 1..23: mol_type = genomic DNA
cgccgggaggagggtctggcggg

SEQ ID NO: 4543 - DNA, 23 bp, Homo sapiens
  source 1..23: mol_type = genomic DNA
cgccggtcgagggtctgggcggg

SEQ ID NO: 4544 - DNA, 23 bp, Homo sapiens
  source 1..23: mol_type = genomic DNA
cgccggtcgagggtttgggcggg

SEQ ID NO: 4545 - DNA, 23 bp, Homo sapiens
  source 1..23: mol_type = genomic DNA
cgccgtggatagagcaagagggg

SEQ ID NO: 4546 - DNA, 23 bp, Homo sapiens
  source 1..23: mol_type = genomic DNA
cgccgtggatagagcaggagagg

SEQ ID NO: 4547 - DNA, 23 bp, Homo sapiens
  source 1..23: mol_type = genomic DNA
cgccgtggatagagcaggagggg

SEQ ID NO: 4548 - DNA, 23 bp, Homo sapiens
  source 1..23: mol_type = genomic DNA
cgccgtgggtggagcaggagggg

SEQ ID NO: 4549 - DNA, 23 bp, Homo sapiens
  source 1..23: mol_type = genomic DNA
cgccgtgtccgcagcggtccagg

SEQ ID NO: 4550 - DNA, 23 bp, Homo sapiens
  source 1..23: mol_type = genomic DNA
cgccgtgtccgccgcggtccagg

SEQ ID NO: 4551 - DNA, 23 bp, Homo sapiens
  source 1..23: mol_type = genomic DNA
cgccgtgtccgcggcagtccagg

SEQ ID NO: 4552 - DNA, 23 bp, Homo sapiens
  source 1..23: mol_type = genomic DNA
cgccgtgtccgcggcggtccagg

SEQ ID NO: 4553 - DNA, 23 bp, Homo sapiens
  source 1..23: mol_type = genomic DNA
cgcctatagatctcccgggctgg

SEQ ID NO: 4554 - DNA, 23 bp, Homo sapiens
  source 1..23: mol_type = genomic DNA
cgcctcccacttgtgcttggtgg

SEQ ID NO: 4555 - DNA, 23 bp, Homo sapiens
  source 1..23: mol_type = genomic DNA
cgcctctgcggggagaagcaagg

SEQ ID NO: 4556 - DNA, 23 bp, Homo sapiens
  source 1..23: mol_type = genomic DNA
cgcctggaggagggtcgggcggg

SEQ ID NO: 4557 - DNA, 23 bp, Homo sapiens
  source 1..23: mol_type = genomic DNA
cgcctgtagatctcccgggctgg

SEQ ID NO: 4558 - DNA, 23 bp, Homo sapiens
  source 1..23: mol_type = genomic DNA
cgcctgtaggtctcccgggctgg

SEQ ID NO: 4559 - DNA, 23 bp, Homo sapiens
  source 1..23: mol_type = genomic DNA
cgccttgatggttgtggtgttgg

SEQ ID NO: 4560 - DNA, 23 bp, Homo sapiens
  source 1..23: mol_type = genomic DNA
cgccttgtccgcggcggtccagg

SEQ ID NO: 4561 - DNA, 23 bp, Homo sapiens
  source 1..23: mol_type = genomic DNA
cgcgcaggtaccaggggcagtgg

SEQ ID NO: 4562 - DNA, 23 bp, Homo sapiens
  source 1..23: mol_type = genomic DNA
cgcgcgggtaccaggggcagtgg

SEQ ID NO: 4563 - DNA, 23 bp, Homo sapiens
  source 1..23: mol_type = genomic DNA
cgcgctggtaccaggggcagtgg

SEQ ID NO: 4564 - DNA, 23 bp, Homo sapiens
  source 1..23: mol_type = genomic DNA
cgcggcttcggggcggatctcgg

SEQ ID NO: 4565 - DNA, 23 bp, Homo sapiens
  source 1..23: mol_type = genomic DNA
cgcggcttcggggtggatctcgg

SEQ ID NO: 4566 - DNA, 23 bp, Homo sapiens
  source 1..23: mol_type = genomic DNA
cgcgggacggggctgaccacggg

SEQ ID NO: 4567 - DNA, 23 bp, Homo sapiens
  source 1..23: mol_type = genomic DNA
cgcgggtaccaggggcagtgggg

SEQ ID NO: 4568 - DNA, 23 bp, Homo sapiens
  source 1..23: mol_type = genomic DNA
cgcggtgtccgccgcggtccagg

SEQ ID NO: 4569 - DNA, 23 bp, Homo sapiens
  source 1..23: mol_type = genomic DNA
cgcggtgtccgcggcggtccagg

SEQ ID NO: 4570 - DNA, 23 bp, Homo sapiens
  source 1..23: mol_type = genomic DNA
cgctcggtcagtctgtgactggg

SEQ ID NO: 4571 - DNA, 23 bp, Homo sapiens
  source 1..23: mol_type = genomic DNA
cgctcggtcagtctgtgagtggg

SEQ ID NO: 4572 - DNA, 23 bp, Homo sapiens
  source 1..23: mol_type = genomic DNA
cgctcggttagtctgtgagtggg

SEQ ID NO: 4573 - DNA, 23 bp, Homo sapiens
  source 1..23: mol_type = genomic DNA
cgctgcagcgcacgggtaccagg

SEQ ID NO: 4574 - DNA, 23 bp, Homo sapiens
  source 1..23: mol_type = genomic DNA
cgctgcagcgcacgggtaccggg

SEQ ID NO: 4575 - DNA, 23 bp, Homo sapiens
  source 1..23: mol_type = genomic DNA
cgctgcagcgcgcaggtaccagg

SEQ ID NO: 4576 - DNA, 23 bp, Homo sapiens
  source 1..23: mol_type = genomic DNA
cgctgcagcgcgcgggtaccagg

SEQ ID NO: 4577 - DNA, 23 bp, Homo sapiens
  source 1..23: mol_type = genomic DNA
cgctggagcgcgcgggtaccagg

SEQ ID NO: 4578 - DNA, 23 bp, Homo sapiens
  source 1..23: mol_type = genomic DNA
cgctggtaccaggggcagtgggg

SEQ ID NO: 4579 - DNA, 23 bp, Homo sapiens
  source 1..23: mol_type = genomic DNA
cgctgtcgaacctcacgaactgg

SEQ ID NO: 4580 - DNA, 23 bp, Homo sapiens
  source 1..23: mol_type = genomic DNA
cgctgtgtccgcggcggtccagg

SEQ ID NO: 4581 - DNA, 23 bp, Homo sapiens
  source 1..23: mol_type = genomic DNA
cgcttgtaaaggtgagattctgg

SEQ ID NO: 4582 - DNA, 23 bp, Homo sapiens
  source 1..23: mol_type = genomic DNA
cggacaggacacctggggtgggg

SEQ ID NO: 4583 - DNA, 23 bp, Homo sapiens
  source 1..23: mol_type = genomic DNA
cggacgggcgcctcctccgcggg

SEQ ID NO: 4584 - DNA, 23 bp, Homo sapiens
  source 1..23: mol_type = genomic DNA
cggacgggcgcttcctccgcggg

SEQ ID NO: 4585 - DNA, 23 bp, Homo sapiens
  source 1..23: mol_type = genomic DNA
cggacggggctcgggggactggg

SEQ ID NO: 4586 - DNA, 23 bp, Homo sapiens
  source 1..23: mol_type = genomic DNA
cggactcacattctccccagagg

SEQ ID NO: 4587 - DNA, 23 bp, Homo sapiens
  source 1..23: mol_type = genomic DNA
cggactggcgcttcctccgcggg

SEQ ID NO: 4588 - DNA, 23 bp, Homo sapiens
  source 1..23: mol_type = genomic DNA
cggactggcgcttcctgcgcggg

SEQ ID NO: 4589 - DNA, 23 bp, Homo sapiens
  source 1..23: mol_type = genomic DNA
cggactggtcatacccgcggagg

SEQ ID NO: 4590 - DNA, 23 bp, Homo sapiens
  source 1..23: mol_type = genomic DNA
cggactggtcatgcccgcggagg

SEQ ID NO: 4591 - DNA, 23 bp, Homo sapiens
  source 1..23: mol_type = genomic DNA
cggagcccctcaccctgagatgg

SEQ ID NO: 4592 - DNA, 23 bp, Homo sapiens
  source 1..23: mol_type = genomic DNA
cggagctgtggtcgctgctgtgg

SEQ ID NO: 4593 - DNA, 23 bp, Homo sapiens
  source 1..23: mol_type = genomic DNA
cggatacctggagaacgggaagg

SEQ ID NO: 4594 - DNA, 23 bp, Homo sapiens
  source 1..23: mol_type = genomic DNA
cggattccgcagcctcggggtgg

SEQ ID NO: 4595 - DNA, 23 bp, Homo sapiens
  source 1..23: mol_type = genomic DNA
cggcagggaaatggcctctgtgg

SEQ ID NO: 4596 - DNA, 23 bp, Homo sapiens
  source 1..23: mol_type = genomic DNA
cggcatggcctcccacgaggagg

SEQ ID NO: 4597 - DNA, 23 bp, Homo sapiens
  source 1..23: mol_type = genomic DNA
cggccactacaaccagagcgagg

SEQ ID NO: 4598 - DNA, 23 bp, Homo sapiens
  source 1..23: mol_type = genomic DNA
cggcccatgaggcggagcagtgg

SEQ ID NO: 4599 - DNA, 23 bp, Homo sapiens
  source 1..23: mol_type = genomic DNA
cggcccatgtggcggagcagtgg

SEQ ID NO: 4600 - DNA, 23 bp, Homo sapiens
  source 1..23: mol_type = genomic DNA
cggcccgtccgtgggggatgagg

SEQ ID NO: 4601 - DNA, 23 bp, Homo sapiens
  source 1..23: mol_type = genomic DNA
cggcccgtgaggcggagcagcgg

SEQ ID NO: 4602 - DNA, 23 bp, Homo sapiens
  source 1..23: mol_type = genomic DNA
cggcccgtgaggcggagcagtgg

SEQ ID NO: 4603 - DNA, 23 bp, Homo sapiens
  source 1..23: mol_type = genomic DNA
cggcccgtgcggcggagcagtgg

SEQ ID NO: 4604 - DNA, 23 bp, Homo sapiens
  source 1..23: mol_type = genomic DNA
cggcccgtgtggcggagcagcgg

SEQ ID NO: 4605 - DNA, 23 bp, Homo sapiens
  source 1..23: mol_type = genomic DNA
cggcctcgctctggttgtagtgg

SEQ ID NO: 4606 - DNA, 23 bp, Homo sapiens
  source 1..23: mol_type = genomic DNA
cggcgagggcgcaggacccgggg

SEQ ID NO: 4607 - DNA, 23 bp, Homo sapiens
  source 1..23: mol_type = genomic DNA
cggctactacaaccagagcgagg

SEQ ID NO: 4608 - DNA, 23 bp, Homo sapiens
  source 1..23: mol_type = genomic DNA
cggctactacaaccggagcgagg

SEQ ID NO: 4609 - DNA, 23 bp, Homo sapiens
  source 1..23: mol_type = genomic DNA
cggctccatcctccggctcgcgg

SEQ ID NO: 4610 - DNA, 23 bp, Homo sapiens
  source 1..23: mol_type = genomic DNA
cggctccatcctctggctcgcgg

SEQ ID NO: 4611 - DNA, 23 bp, Homo sapiens
  source 1..23: mol_type = genomic DNA
cggctccatcttctggctcgcgg

SEQ ID NO: 4612 - DNA, 23 bp, Homo sapiens
  source 1..23: mol_type = genomic DNA
cggctcccctctcggactcgcgg

SEQ ID NO: 4613 - DNA, 23 bp, Homo sapiens
  source 1..23: mol_type = genomic DNA
cggctcccctcttggactcgcgg

SEQ ID NO: 4614 - DNA, 23 bp, Homo sapiens
  source 1..23: mol_type = genomic DNA
cggctcctctctcggactcgcgg

SEQ ID NO: 4615 - DNA, 23 bp, Homo sapiens
  source 1..23: mol_type = genomic DNA
cggctccttcctcggactcgcgg

SEQ ID NO: 4616 - DNA, 23 bp, Homo sapiens
  source 1..23: mol_type = genomic DNA
cggctccttcctcggactcgtgg

SEQ ID NO: 4617 - DNA, 23 bp, Homo sapiens
  source 1..23: mol_type = genomic DNA
cgggaagagtcagaaaattcagg

SEQ ID NO: 4618 - DNA, 23 bp, Homo sapiens
  source 1..23: mol_type = genomic DNA
cgggaagccgcgccgggaggagg

SEQ ID NO: 4619 - DNA, 23 bp, Homo sapiens
  source 1..23: mol_type = genomic DNA
cgggaagccgcgcctggaggagg

SEQ ID NO: 4620 - DNA, 23 bp, Homo sapiens
  source 1..23: mol_type = genomic DNA
cgggacacctggggtggggaagg

SEQ ID NO: 4621 - DNA, 23 bp, Homo sapiens
  source 1..23: mol_type = genomic DNA
cgggacctgcgccccgggccggg

SEQ ID NO: 4622 - DNA, 23 bp, Homo sapiens
  source 1..23: mol_type = genomic DNA
cgggacggggctgaccacggggg

SEQ ID NO: 4623 - DNA, 23 bp, Homo sapiens
  source 1..23: mol_type = genomic DNA
cgggactggggcggggctcgggg

SEQ ID NO: 4624 - DNA, 23 bp, Homo sapiens
  source 1..23: mol_type = genomic DNA
cgggagacctacaggcgatcagg

SEQ ID NO: 4625 - DNA, 23 bp, Homo sapiens
  source 1..23: mol_type = genomic DNA
cgggagactcggggcgacccggg

SEQ ID NO: 4626 - DNA, 23 bp, Homo sapiens
  source 1..23: mol_type = genomic DNA
cgggagacttggggcgacccggg

SEQ ID NO: 4627 - DNA, 23 bp, Homo sapiens
  source 1..23: mol_type = genomic DNA
cgggagatctacaggagataggg

SEQ ID NO: 4628 - DNA, 23 bp, Homo sapiens
  source 1..23: mol_type = genomic DNA
cgggagatctacaggagatgggg

SEQ ID NO: 4629 - DNA, 23 bp, Homo sapiens
  source 1..23: mol_type = genomic DNA
cgggagatctacaggcgatcagg

SEQ ID NO: 4630 - DNA, 23 bp, Homo sapiens
  source 1..23: mol_type = genomic DNA
cgggagatctacgggagatgggg

SEQ ID NO: 4631 - DNA, 23 bp, Homo sapiens
  source 1..23: mol_type = genomic DNA
cgggagatctataggagatgggg

SEQ ID NO: 4632 - DNA, 23 bp, Homo sapiens
  source 1..23: mol_type = genomic DNA
cgggagatctataggcgatcagg

SEQ ID NO: 4633 - DNA, 23 bp, Homo sapiens
  source 1..23: mol_type = genomic DNA
cgggagggaaaccgcctctgcgg

SEQ ID NO: 4634 - DNA, 23 bp, Homo sapiens
  source 1..23: mol_type = genomic DNA
cgggagggaaacggcctctgcgg

SEQ ID NO: 4635 - DNA, 23 bp, Homo sapiens
  source 1..23: mol_type = genomic DNA
cgggagggaaacggcctctgtgg

SEQ ID NO: 4636 - DNA, 23 bp, Homo sapiens
  source 1..23: mol_type = genomic DNA
cgggagggaaatggcctctgtgg

SEQ ID NO: 4637 - DNA, 23 bp, Homo sapiens
  source 1..23: mol_type = genomic DNA
cgggatggcctcccacgaggagg

SEQ ID NO: 4638 - DNA, 23 bp, Homo sapiens
  source 1..23: mol_type = genomic DNA
cgggatggccttccacgaggagg

SEQ ID NO: 4639 - DNA, 23 bp, Homo sapiens
  source 1..23: mol_type = genomic DNA
cgggcagggcttgggggactggg

SEQ ID NO: 4640 - DNA, 23 bp, Homo sapiens
  source 1..23: mol_type = genomic DNA
cgggccgggacacggaggtgtgg

SEQ ID NO: 4641 - DNA, 23 bp, Homo sapiens
  source 1..23: mol_type = genomic DNA
cgggccgggacatggcggtgtgg

SEQ ID NO: 4642 - DNA, 23 bp, Homo sapiens
  source 1..23: mol_type = genomic DNA
cgggccgtacgtgggggatgggg

SEQ ID NO: 4643 - DNA, 23 bp, Homo sapiens
  source 1..23: mol_type = genomic DNA
cgggccgtccgtgggggatgagg

SEQ ID NO: 4644 - DNA, 23 bp, Homo sapiens
  source 1..23: mol_type = genomic DNA
cgggccgtccgtgggggatgggg

SEQ ID NO: 4645 - DNA, 23 bp, Homo sapiens
  source 1..23: mol_type = genomic DNA
cgggcggggctcgggggactggg

SEQ ID NO: 4646 - DNA, 23 bp, Homo sapiens
  source 1..23: mol_type = genomic DNA
cgggctggcctcccacaaggagg

SEQ ID NO: 4647 - DNA, 23 bp, Homo sapiens
  source 1..23: mol_type = genomic DNA
cggggagacacggaaagtgaagg

SEQ ID NO: 4648 - DNA, 23 bp, Homo sapiens
  source 1..23: mol_type = genomic DNA
cggggagacacggaacatgaagg

SEQ ID NO: 4649 - DNA, 23 bp, Homo sapiens
  source 1..23: mol_type = genomic DNA
cggggagactcggggcgacccgg

SEQ ID NO: 4650 - DNA, 23 bp, Homo sapiens
  source 1..23: mol_type = genomic DNA
cggggagactctaggcgacccgg

SEQ ID NO: 4651 - DNA, 23 bp, Homo sapiens
  source 1..23: mol_type = genomic DNA
cggggagactctgggcgacccgg

SEQ ID NO: 4652 - DNA, 23 bp, Homo sapiens
  source 1..23: mol_type = genomic DNA
cggggagccgcgcagggaggagg

SEQ ID NO: 4653 - DNA, 23 bp, Homo sapiens
  source 1..23: mol_type = genomic DNA
cggggagccgcgcagggaggtgg

SEQ ID NO: 4654 - DNA, 23 bp, Homo sapiens
  source 1..23: mol_type = genomic DNA
cggggagccgcgccgggaggagg

SEQ ID NO: 4655 - DNA, 23 bp, Homo sapiens
  source 1..23: mol_type = genomic DNA
cggggccagggtctcacacttgg

SEQ ID NO: 4656 - DNA, 23 bp, Homo sapiens
  source 1..23: mol_type = genomic DNA
cggggccctcagaggaaactcgg

SEQ ID NO: 4657 - DNA, 23 bp, Homo sapiens
  source 1..23: mol_type = genomic DNA
cggggccggacggggctcggggg

SEQ ID NO: 4658 - DNA, 23 bp, Homo sapiens
  source 1..23: mol_type = genomic DNA
cggggccgggcagggcttggggg

SEQ ID NO: 4659 - DNA, 23 bp, Homo sapiens
  source 1..23: mol_type = genomic DNA
cggggccgggcggggctcggggg

SEQ ID NO: 4660 - DNA, 23 bp, Homo sapiens
  source 1..23: mol_type = genomic DNA
cggggcggggcggggctcggggg

SEQ ID NO: 4661 - DNA, 23 bp, Homo sapiens
  source 1..23: mol_type = genomic DNA
cggggcggggctcgggggaccgg

SEQ ID NO: 4662 - DNA, 23 bp, Homo sapiens
  source 1..23: mol_type = genomic DNA
cggggcggggctcgggggacggg

SEQ ID NO: 4663 - DNA, 23 bp, Homo sapiens
  source 1..23: mol_type = genomic DNA
cggggcggggctcgggggactgg

SEQ ID NO: 4664 - DNA, 23 bp, Homo sapiens
  source 1..23: mol_type = genomic DNA
cggggcggggctcggggggacgg

SEQ ID NO: 4665 - DNA, 23 bp, Homo sapiens
  source 1..23: mol_type = genomic DNA
cggggctgaccacgggggcgggg

SEQ ID NO: 4666 - DNA, 23 bp, Homo sapiens
  source 1..23: mol_type = genomic DNA
cggggctgaccgcggggccgggg

SEQ ID NO: 4667 - DNA, 23 bp, Homo sapiens
  source 1..23: mol_type = genomic DNA
cggggctgaccgcggggcctggg

SEQ ID NO: 4668 - DNA, 23 bp, Homo sapiens
  source 1..23: mol_type = genomic DNA
cggggctgaccgcgggggcgggg

SEQ ID NO: 4669 - DNA, 23 bp, Homo sapiens
  source 1..23: mol_type = genomic DNA
cggggctgggcggggctcggggg

SEQ ID NO: 4670 - DNA, 23 bp, Homo sapiens
  source 1..23: mol_type = genomic DNA
cggggctggggcggggctcgcgg

SEQ ID NO: 4671 - DNA, 23 bp, Homo sapiens
  source 1..23: mol_type = genomic DNA
cggggctggggcggggctcgggg

SEQ ID NO: 4672 - DNA, 23 bp, Homo sapiens
  source 1..23: mol_type = genomic DNA
cgggggaccgggctgaccacggg

SEQ ID NO: 4673 - DNA, 23 bp, Homo sapiens
  source 1..23: mol_type = genomic DNA
cgggggaccgggctgaccgcggg

SEQ ID NO: 4674 - DNA, 23 bp, Homo sapiens
  source 1..23: mol_type = genomic DNA
cgggggaccgggctgacctcggg

SEQ ID NO: 4675 - DNA, 23 bp, Homo sapiens
  source 1..23: mol_type = genomic DNA
cgggggacgggctgaccacgggg

SEQ ID NO: 4676 - DNA, 23 bp, Homo sapiens
  source 1..23: mol_type = genomic DNA
cgggggacggggctgaccacggg

SEQ ID NO: 4677 - DNA, 23 bp, Homo sapiens
  source 1..23: mol_type = genomic DNA
cgggggacggggctgaccgcggg

SEQ ID NO: 4678 - DNA, 23 bp, Homo sapiens
  source 1..23: mol_type = genomic DNA
cgggggacggtgctgaccgcggg

SEQ ID NO: 4679 - DNA, 23 bp, Homo sapiens
  source 1..23: mol_type = genomic DNA
cgggggactgggctgaccgcggg

SEQ ID NO: 4680 - DNA, 23 bp, Homo sapiens
  source 1..23: mol_type = genomic DNA
cgggggactgggctgaccgtggg

SEQ ID NO: 4681 - DNA, 23 bp, Homo sapiens
  source 1..23: mol_type = genomic DNA
cggggggacggggctgaccgcgg

SEQ ID NO: 4682 - DNA, 23 bp, Homo sapiens
  source 1..23: mol_type = genomic DNA
cggggggactgggctgaccgcgg

SEQ ID NO: 4683 - DNA, 23 bp, Homo sapiens
  source 1..23: mol_type = genomic DNA
cgggggggggtggggtggggagg

SEQ ID NO: 4684 - DNA, 23 bp, Homo sapiens
  source 1..23: mol_type = genomic DNA
cggggggggtggggtggggaggg

SEQ ID NO: 4685 - DNA, 23 bp, Homo sapiens
  source 1..23: mol_type = genomic DNA
cggggggggtggtggggcagagg

SEQ ID NO: 4686 - DNA, 23 bp, Homo sapiens
  source 1..23: mol_type = genomic DNA
cgggggtgtcatgtcttttaggg

SEQ ID NO: 4687 - DNA, 23 bp, Homo sapiens
  source 1..23: mol_type = genomic DNA
cggggtggggcagaggggaaagg

SEQ ID NO: 4688 - DNA, 23 bp, Homo sapiens
  source 1..23: mol_type = genomic DNA
cgggtagccgcgccgggaggagg

SEQ ID NO: 4689 - DNA, 23 bp, Homo sapiens
  source 1..23: mol_type = genomic DNA
cgggtcagggctgaggcttgggg

SEQ ID NO: 4690 - DNA, 23 bp, Homo sapiens
  source 1..23: mol_type = genomic DNA
cgggtcccgcggcctcagggagg

SEQ ID NO: 4691 - DNA, 23 bp, Homo sapiens
  source 1..23: mol_type = genomic DNA
cgggtcccgcggcctcagggggg

SEQ ID NO: 4692 - DNA, 23 bp, Homo sapiens
  source 1..23: mol_type = genomic DNA
cgggtctgagatccaccccgagg

SEQ ID NO: 4693 - DNA, 23 bp, Homo sapiens
  source 1..23: mol_type = genomic DNA
cgggtgagtgcggggtcgggagg

SEQ ID NO: 4694 - DNA, 23 bp, Homo sapiens
  source 1..23: mol_type = genomic DNA
cgggtgagtgcggggtcgtgggg

SEQ ID NO: 4695 - DNA, 23 bp, Homo sapiens
  source 1..23: mol_type = genomic DNA
cgggtgggtcggggcggggcggg

SEQ ID NO: 4696 - DNA, 23 bp, Homo sapiens
  source 1..23: mol_type = genomic DNA
cgggtgggtgacttcagaaccgg

SEQ ID NO: 4697 - DNA, 23 bp, Homo sapiens
  source 1..23: mol_type = genomic DNA
cgggttccgcagatccaccttgg

SEQ ID NO: 4698 - DNA, 23 bp, Homo sapiens
  source 1..23: mol_type = genomic DNA
cgggttccgcagcctcggggagg

SEQ ID NO: 4699 - DNA, 23 bp, Homo sapiens
  source 1..23: mol_type = genomic DNA
cgggttccgcagcctcggggtgg

SEQ ID NO: 4700 - DNA, 23 bp, Homo sapiens
  source 1..23: mol_type = genomic DNA
cgggttgggcggggcggggcggg

SEQ ID NO: 4701 - DNA, 23 bp, Homo sapiens
  source 1..23: mol_type = genomic DNA
cgggttggtcagggcggggcggg

SEQ ID NO: 4702 - DNA, 23 bp, Homo sapiens
  source 1..23: mol_type = genomic DNA
cgggttggtcgggactggggcgg

SEQ ID NO: 4703 - DNA, 23 bp, Homo sapiens
  source 1..23: mol_type = genomic DNA
cgggttggtcggggccggacggg

SEQ ID NO: 4704 - DNA, 23 bp, Homo sapiens
  source 1..23: mol_type = genomic DNA
cgggttggtcggggccgggcagg

SEQ ID NO: 4705 - DNA, 23 bp, Homo sapiens
  source 1..23: mol_type = genomic DNA
cgggttggtcggggccgggcggg

SEQ ID NO: 4706 - DNA, 23 bp, Homo sapiens
  source 1..23: mol_type = genomic DNA
cgggttggtcggggcggggcggg

SEQ ID NO: 4707 - DNA, 23 bp, Homo sapiens
  source 1..23: mol_type = genomic DNA
cgggttggtcggggctgggcggg

SEQ ID NO: 4708 - DNA, 23 bp, Homo sapiens
  source 1..23: mol_type = genomic DNA
cgggttggtcggggctggggcgg

SEQ ID NO: 4709 - DNA, 23 bp, Homo sapiens
  source 1..23: mol_type = genomic DNA
cggtccatgcggcggagcagcgg

SEQ ID NO: 4710 - DNA, 23 bp, Homo sapiens
  source 1..23: mol_type = genomic DNA
cggtgagtgaccccagcccgggg

SEQ ID NO: 4711 - DNA, 23 bp, Homo sapiens
  source 1..23: mol_type = genomic DNA
cggtgagtgaccccgcccggggg

SEQ ID NO: 4712 - DNA, 23 bp, Homo sapiens
  source 1..23: mol_type = genomic DNA
cggtgagtgaccccggcccgggg

SEQ ID NO: 4713 - DNA, 23 bp, Homo sapiens
  source 1..23: mol_type = genomic DNA
cggtgagtgaccccggccggggg

SEQ ID NO: 4714 - DNA, 23 bp, Homo sapiens
  source 1..23: mol_type = genomic DNA
cggtgagtgaccccggcctgggg

SEQ ID NO: 4715 - DNA, 23 bp, Homo sapiens
  source 1..23: mol_type = genomic DNA
cggtgagtgcgggatcgggaggg

SEQ ID NO: 4716 - DNA, 23 bp, Homo sapiens
  source 1..23: mol_type = genomic DNA
cggtgagtgcggggtcggcaggg

SEQ ID NO: 4717 - DNA, 23 bp, Homo sapiens
  source 1..23: mol_type = genomic DNA
cggtgagtgcggggtcgggaggg

SEQ ID NO: 4718 - DNA, 23 bp, Homo sapiens
  source 1..23: mol_type = genomic DNA
cggtgagtgcggggttgggaggg

SEQ ID NO: 4719 - DNA, 23 bp, Homo sapiens
  source 1..23: mol_type = genomic DNA
cggtgctgaccgcggggccgggg

SEQ ID NO: 4720 - DNA, 23 bp, Homo sapiens
  source 1..23: mol_type = genomic DNA
cggttcccaaggctgctgcaggg

SEQ ID NO: 4721 - DNA, 23 bp, Homo sapiens
  source 1..23: mol_type = genomic DNA
cggttctgaagtcacccacccgg

SEQ ID NO: 4722 - DNA, 23 bp, Homo sapiens
  source 1..23: mol_type = genomic DNA
cgtactggtcatacccgcggagg

SEQ ID NO: 4723 - DNA, 23 bp, Homo sapiens
  source 1..23: mol_type = genomic DNA
cgtactggtcatgcccgcggagg

SEQ ID NO: 4724 - DNA, 23 bp, Homo sapiens
  source 1..23: mol_type = genomic DNA
cgtactggtggtacccgcgcagg

SEQ ID NO: 4725 - DNA, 23 bp, Homo sapiens
  source 1..23: mol_type = genomic DNA
cgtactggtggtacccgcggagg

SEQ ID NO: 4726 - DNA, 23 bp, Homo sapiens
  source 1..23: mol_type = genomic DNA
cgtactggttatgcccgcggagg

SEQ ID NO: 4727 - DNA, 23 bp, Homo sapiens
  source 1..23: mol_type = genomic DNA
cgtagcccacggcgatgaagcgg

SEQ ID NO: 4728 - DNA, 23 bp, Homo sapiens
  source 1..23: mol_type = genomic DNA
cgtagcccacggtgatgaagcgg

SEQ ID NO: 4729 - DNA, 23 bp, Homo sapiens
  source 1..23: mol_type = genomic DNA
cgtagcccactgagatgaagcgg

SEQ ID NO: 4730 - DNA, 23 bp, Homo sapiens
  source 1..23: mol_type = genomic DNA
cgtagcccactgcaatgaagcgg

SEQ ID NO: 4731 - DNA, 23 bp, Homo sapiens
  source 1..23: mol_type = genomic DNA
cgtagcccactgcgatgaagcgg

SEQ ID NO: 4732 - DNA, 23 bp, Homo sapiens
  source 1..23: mol_type = genomic DNA
cgtagcccactgcgatgaagtgg

SEQ ID NO: 4733 - DNA, 23 bp, Homo sapiens
  source 1..23: mol_type = genomic DNA
cgtccacgcaccggccctccagg

SEQ ID NO: 4734 - DNA, 23 bp, Homo sapiens
  source 1..23: mol_type = genomic DNA
cgtccacgcacgtgccctccagg

SEQ ID NO: 4735 - DNA, 23 bp, Homo sapiens
  source 1..23: mol_type = genomic DNA
cgtccacgcactcgccctccagg

SEQ ID NO: 4736 - DNA, 23 bp, Homo sapiens
  source 1..23: mol_type = genomic DNA
cgtccggccccgaccaacccggg

SEQ ID NO: 4737 - DNA, 23 bp, Homo sapiens
  source 1..23: mol_type = genomic DNA
cgtccgtgggggatgaggagggg

SEQ ID NO: 4738 - DNA, 23 bp, Homo sapiens
  source 1..23: mol_type = genomic DNA
cgtccgtgggggatggggagagg

SEQ ID NO: 4739 - DNA, 23 bp, Homo sapiens
  source 1..23: mol_type = genomic DNA
cgtccgtgggggatggggagggg

SEQ ID NO: 4740 - DNA, 23 bp, Homo sapiens
  source 1..23: mol_type = genomic DNA
cgtcctcctgctgctctcggcgg

SEQ ID NO: 4741 - DNA, 23 bp, Homo sapiens
  source 1..23: mol_type = genomic DNA
cgtcctcctgctgctctgggggg

SEQ ID NO: 4742 - DNA, 23 bp, Homo sapiens
  source 1..23: mol_type = genomic DNA
cgtcctgccggtacccgcggagg

SEQ ID NO: 4743 - DNA, 23 bp, Homo sapiens
  source 1..23: mol_type = genomic DNA
cgtcctgctggtacccgcggagg

SEQ ID NO: 4744 - DNA, 23 bp, Homo sapiens
  source 1..23: mol_type = genomic DNA
cgtcctggtcatacccgcggagg

SEQ ID NO: 4745 - DNA, 23 bp, Homo sapiens
  source 1..23: mol_type = genomic DNA
cgtcctggtggtacccgcggagg

SEQ ID NO: 4746 - DNA, 23 bp, Homo sapiens
  source 1..23: mol_type = genomic DNA
cgtcgcagccaaacatcatctgg

SEQ ID NO: 4747 - DNA, 23 bp, Homo sapiens
  source 1..23: mol_type = genomic DNA
cgtcgcagccaaacatcctctgg

SEQ ID NO: 4748 - DNA, 23 bp, Homo sapiens
  source 1..23: mol_type = genomic DNA
cgtcgcagccacacatcctctgg

SEQ ID NO: 4749 - DNA, 23 bp, Homo sapiens
  source 1..23: mol_type = genomic DNA
cgtcgcagccagacatcctctgg

SEQ ID NO: 4750 - DNA, 23 bp, Homo sapiens
  source 1..23: mol_type = genomic DNA
cgtcgcagccatacatattctgg

SEQ ID NO: 4751 - DNA, 23 bp, Homo sapiens
  source 1..23: mol_type = genomic DNA
cgtcgcagccatacatcacctgg

SEQ ID NO: 4752 - DNA, 23 bp, Homo sapiens
  source 1..23: mol_type = genomic DNA
cgtcgcagccatacatcatctgg

SEQ ID NO: 4753 - DNA, 23 bp, Homo sapiens
  source 1..23: mol_type = genomic DNA
cgtcgcagccatacatccactgg

SEQ ID NO: 4754 - DNA, 23 bp, Homo sapiens
  source 1..23: mol_type = genomic DNA
cgtcgcagccatacatcctctgg

SEQ ID NO: 4755 - DNA, 23 bp, Homo sapiens
  source 1..23: mol_type = genomic DNA
cgtcgcagccatacattatctgg

SEQ ID NO: 4756 - DNA, 23 bp, Homo sapiens
  source 1..23: mol_type = genomic DNA
cgtcgcagccgtacatcctctgg

SEQ ID NO: 4757 - DNA, 23 bp, Homo sapiens
  source 1..23: mol_type = genomic DNA
cgtcgcagccgtacatgctctgg

SEQ ID NO: 4758 - DNA, 23 bp, Homo sapiens
  source 1..23: mol_type = genomic DNA
cgtctcccacttgtgcttggtgg

SEQ ID NO: 4759 - DNA, 23 bp, Homo sapiens
  source 1..23: mol_type = genomic DNA
cgtgaagaaatcctgcatctcgg

SEQ ID NO: 4760 - DNA, 23 bp, Homo sapiens
  source 1..23: mol_type = genomic DNA
cgtgacctgcgccccaggccggg

SEQ ID NO: 4761 - DNA, 23 bp, Homo sapiens
  source 1..23: mol_type = genomic DNA
cgtgacctgcgcccccggccggg

SEQ ID NO: 4762 - DNA, 23 bp, Homo sapiens
  source 1..23: mol_type = genomic DNA
cgtgacctgcgcccccgggcggg

SEQ ID NO: 4763 - DNA, 23 bp, Homo sapiens
  source 1..23: mol_type = genomic DNA
cgtgacctgcgccccgggccggg

SEQ ID NO: 4764 - DNA, 23 bp, Homo sapiens
  source 1..23: mol_type = genomic DNA
cgtgacctgcgccccgggctggg

SEQ ID NO: 4765 - DNA, 23 bp, Homo sapiens
  source 1..23: mol_type = genomic DNA
cgtgccatatgcagcacgagggg

SEQ ID NO: 4766 - DNA, 23 bp, Homo sapiens
  source 1..23: mol_type = genomic DNA
cgtgccatgtgcagcacgagggg

SEQ ID NO: 4767 - DNA, 23 bp, Homo sapiens
  source 1..23: mol_type = genomic DNA
cgtgccatgttcagcacgagggg

SEQ ID NO: 4768 - DNA, 23 bp, Homo sapiens
  source 1..23: mol_type = genomic DNA
cgtgctgttcatacccgcggagg

SEQ ID NO: 4769 - DNA, 23 bp, Homo sapiens
  source 1..23: mol_type = genomic DNA
cgtggagaccaggcctgcagggg

SEQ ID NO: 4770 - DNA, 23 bp, Homo sapiens
  source 1..23: mol_type = genomic DNA
cgtggcagccatacatcatctgg

SEQ ID NO: 4771 - DNA, 23 bp, Homo sapiens
  source 1..23: mol_type = genomic DNA
cgtgggacaggaggaattagggg

SEQ ID NO: 4772 - DNA, 23 bp, Homo sapiens
  source 1..23: mol_type = genomic DNA
cgtgggacaggaggaattatggg

SEQ ID NO: 4773 - DNA, 23 bp, Homo sapiens
  source 1..23: mol_type = genomic DNA
cgtgggcatcattgctggcctgg

SEQ ID NO: 4774 - DNA, 23 bp, Homo sapiens
  source 1..23: mol_type = genomic DNA
cgtgggcatccttgctggcctgg

SEQ ID NO: 4775 - DNA, 23 bp, Homo sapiens
  source 1..23: mol_type = genomic DNA
cgtgggcatcgttgctggcctgg

SEQ ID NO: 4776 - DNA, 23 bp, Homo sapiens
  source 1..23: mol_type = genomic DNA
cgtgggcattgttgctggcctgg

SEQ ID NO: 4777 - DNA, 23 bp, Homo sapiens
  source 1..23: mol_type = genomic DNA
cgtggggaaaccgcctctgcggg

SEQ ID NO: 4778 - DNA, 23 bp, Homo sapiens
  source 1..23: mol_type = genomic DNA
cgtgggggatggggaggggtcgg

SEQ ID NO: 4779 - DNA, 23 bp, Homo sapiens
  source 1..23: mol_type = genomic DNA
cgtgtaggcataatgtgaggagg

SEQ ID NO: 4780 - DNA, 23 bp, Homo sapiens
  source 1..23: mol_type = genomic DNA
cgtgtcccggcccggccgcgggg

SEQ ID NO: 4781 - DNA, 23 bp, Homo sapiens
  source 1..23: mol_type = genomic DNA
cgtgtcctggcccggccgcgggg

SEQ ID NO: 4782 - DNA, 23 bp, Homo sapiens
  source 1..23: mol_type = genomic DNA
cgtgtcgtccacgtagcccacgg

SEQ ID NO: 4783 - DNA, 23 bp, Homo sapiens
  source 1..23: mol_type = genomic DNA
cgtgtttcctgatcctgccctgg

SEQ ID NO: 4784 - DNA, 23 bp, Homo sapiens
  source 1..23: mol_type = genomic DNA
cgtgtttcctgatcctgccttgg

SEQ ID NO: 4785 - DNA, 23 bp, Homo sapiens
  source 1..23: mol_type = genomic DNA
cgttctcaggatggtcacatggg

SEQ ID NO: 4786 - DNA, 23 bp, Homo sapiens
  source 1..23: mol_type = genomic DNA
cgttgctggcctggctgtcctgg

SEQ ID NO: 4787 - DNA, 23 bp, Homo sapiens
  source 1..23: mol_type = genomic DNA
cgtttctggcccagctgtcctgg

SEQ ID NO: 4788 - DNA, 23 bp, Homo sapiens
  source 1..23: mol_type = genomic DNA
ctaactggtcatgcccgcggagg

SEQ ID NO: 4789 - DNA, 23 bp, Homo sapiens
  source 1..23: mol_type = genomic DNA
ctaactggttatacccgcggagg

SEQ ID NO: 4790 - DNA, 23 bp, Homo sapiens
  source 1..23: mol_type = genomic DNA
ctaactggttatgcccgcggagg

SEQ ID NO: 4791 - DNA, 23 bp, Homo sapiens
  source 1..23: mol_type = genomic DNA
ctacctggagggcacgtgcgtgg

SEQ ID NO: 4792 - DNA, 23 bp, Homo sapiens
  source 1..23: mol_type = genomic DNA
ctacctggagggccggtgcgtgg

SEQ ID NO: 4793 - DNA, 23 bp, Homo sapiens
  source 1..23: mol_type = genomic DNA
ctacctggagggcctgtgcgtgg

SEQ ID NO: 4794 - DNA, 23 bp, Homo sapiens
  source 1..23: mol_type = genomic DNA
ctacctggagggcgagtgcgtgg

SEQ ID NO: 4795 - DNA, 23 bp, Homo sapiens
  source 1..23: mol_type = genomic DNA
ctacctggatggcacgtgcgtgg

SEQ ID NO: 4796 - DNA, 23 bp, Homo sapiens
  source 1..23: mol_type = genomic DNA
ctacggagatcacactgacctgg

SEQ ID NO: 4797 - DNA, 23 bp, Homo sapiens
  source 1..23: mol_type = genomic DNA
ctacgtagggtccttcatcctgg

SEQ ID NO: 4798 - DNA, 23 bp, Homo sapiens
  source 1..23: mol_type = genomic DNA
ctagaatatcaccctccctctgg

SEQ ID NO: 4799 - DNA, 23 bp, Homo sapiens
  source 1..23: mol_type = genomic DNA
ctagaatatcgccctccctctgg

SEQ ID NO: 4800 - DNA, 23 bp, Homo sapiens
  source 1..23: mol_type = genomic DNA
ctagacacccgacacccaatggg

SEQ ID NO: 4801 - DNA, 23 bp, Homo sapiens
  source 1..23: mol_type = genomic DNA
ctagaggaacctccaagtcttgg

SEQ ID NO: 4802 - DNA, 23 bp, Homo sapiens
  source 1..23: mol_type = genomic DNA
ctagaggaacctcctagtcttgg

SEQ ID NO: 4803 - DNA, 23 bp, Homo sapiens
  source 1..23: mol_type = genomic DNA
ctagaggaacctcgtagccttgg

SEQ ID NO: 4804 - DNA, 23 bp, Homo sapiens
  source 1..23: mol_type = genomic DNA
ctagaggaggaattgtgaggtgg

SEQ ID NO: 4805 - DNA, 23 bp, Homo sapiens
  source 1..23: mol_type = genomic DNA
ctagaggaggaattgtggggtgg

SEQ ID NO: 4806 - DNA, 23 bp, Homo sapiens
  source 1..23: mol_type = genomic DNA
ctagagtgggcgggggggcgggg

SEQ ID NO: 4807 - DNA, 23 bp, Homo sapiens
  source 1..23: mol_type = genomic DNA
ctagagtgggcggggggggcggg

SEQ ID NO: 4808 - DNA, 23 bp, Homo sapiens
  source 1..23: mol_type = genomic DNA
ctagagtgggcgggggggggtgg

SEQ ID NO: 4809 - DNA, 23 bp, Homo sapiens
  source 1..23: mol_type = genomic DNA
ctagagtgggcggggggggtggg

SEQ ID NO: 4810 - DNA, 23 bp, Homo sapiens
  source 1..23: mol_type = genomic DNA
ctagagtgggtgggggtggcggg

SEQ ID NO: 4811 - DNA, 23 bp, Homo sapiens
  source 1..23: mol_type = genomic DNA
ctagatatccaatacccaatggg

SEQ ID NO: 4812 - DNA, 23 bp, Homo sapiens
  source 1..23: mol_type = genomic DNA
ctagatatccgacacccaatggg

SEQ ID NO: 4813 - DNA, 23 bp, Homo sapiens
  source 1..23: mol_type = genomic DNA
ctaggacaaccaggacagccagg

SEQ ID NO: 4814 - DNA, 23 bp, Homo sapiens
  source 1..23: mol_type = genomic DNA
ctaggacagccaggacagccagg

SEQ ID NO: 4815 - DNA, 23 bp, Homo sapiens
  source 1..23: mol_type = genomic DNA
ctaggacagctaggacagccagg

SEQ ID NO: 4816 - DNA, 23 bp, Homo sapiens
  source 1..23: mol_type = genomic DNA
ctagggctctctccggtcgaggg

SEQ ID NO: 4817 - DNA, 23 bp, Homo sapiens
  source 1..23: mol_type = genomic DNA
ctatctcctgtagatctcccggg

SEQ ID NO: 4818 - DNA, 23 bp, Homo sapiens
  source 1..23: mol_type = genomic DNA
ctatgtagggtccttcttcctgg

SEQ ID NO: 4819 - DNA, 23 bp, Homo sapiens
  source 1..23: mol_type = genomic DNA
ctatgtcgggtccttcttccagg

SEQ ID NO: 4820 - DNA, 23 bp, Homo sapiens
  source 1..23: mol_type = genomic DNA
ctcacactcaatgtgtctgaagg

SEQ ID NO: 4821 - DNA, 23 bp, Homo sapiens
  source 1..23: mol_type = genomic DNA
ctcacctttacaagctgtgaggg

SEQ ID NO: 4822 - DNA, 23 bp, Homo sapiens
  source 1..23: mol_type = genomic DNA
ctcacgctcaatgtgtttaaagg

SEQ ID NO: 4823 - DNA, 23 bp, Homo sapiens
  source 1..23: mol_type = genomic DNA
ctcacgctcaatgtgtttgaagg

SEQ ID NO: 4824 - DNA, 23 bp, Homo sapiens
  source 1..23: mol_type = genomic DNA
ctcagaccaccaagcacaagtgg

SEQ ID NO: 4825 - DNA, 23 bp, Homo sapiens
  source 1..23: mol_type = genomic DNA
ctcagagtctcaggccccgaagg

SEQ ID NO: 4826 - DNA, 23 bp, Homo sapiens
  source 1..23: mol_type = genomic DNA
ctcagatcaccaagcgcaagtgg

SEQ ID NO: 4827 - DNA, 23 bp, Homo sapiens
  source 1..23: mol_type = genomic DNA
ctcagatcacccagcgcaagtgg

SEQ ID NO: 4828 - DNA, 23 bp, Homo sapiens
  source 1..23: mol_type = genomic DNA
ctcagatcacccagctcaagtgg

SEQ ID NO: 4829 - DNA, 23 bp, Homo sapiens
  source 1..23: mol_type = genomic DNA
ctcagatctcccagcgcaagtgg

SEQ ID NO: 4830 - DNA, 23 bp, Homo sapiens
  source 1..23: mol_type = genomic DNA
ctcagccactcctcgcccccagg

SEQ ID NO: 4831 - DNA, 23 bp, Homo sapiens
  source 1..23: mol_type = genomic DNA
ctcagccactcctcgtccccagg

SEQ ID NO: 4832 - DNA, 23 bp, Homo sapiens
  source 1..23: mol_type = genomic DNA
ctcagccactgctcgcccccagg

SEQ ID NO: 4833 - DNA, 23 bp, Homo sapiens
  source 1..23: mol_type = genomic DNA
ctcagcccctcctcacccccagg

SEQ ID NO: 4834 - DNA, 23 bp, Homo sapiens
  source 1..23: mol_type = genomic DNA
ctcagcccctcctcgcccccagg

SEQ ID NO: 4835 - DNA, 23 bp, Homo sapiens
  source 1..23: mol_type = genomic DNA
ctcagcccctcctctcccccagg

SEQ ID NO: 4836 - DNA, 23 bp, Homo sapiens
  source 1..23: mol_type = genomic DNA
ctcagcccctcctggcccccagg

SEQ ID NO: 4837 - DNA, 23 bp, Homo sapiens
  source 1..23: mol_type = genomic DNA
ctcagccctgacccagctgaagg

SEQ ID NO: 4838 - DNA, 23 bp, Homo sapiens
  source 1..23: mol_type = genomic DNA
ctcagccctgacccggctgaagg

SEQ ID NO: 4839 - DNA, 23 bp, Homo sapiens
  source 1..23: mol_type = genomic DNA
ctcagccctgacctggctgaagg

SEQ ID NO: 4840 - DNA, 23 bp, Homo sapiens
  source 1..23: mol_type = genomic DNA
ctcagctcctcctcgcccccagg

SEQ ID NO: 4841 - DNA, 23 bp, Homo sapiens
  source 1..23: mol_type = genomic DNA
ctcaggagacgtgggacaggagg

SEQ ID NO: 4842 - DNA, 23 bp, Homo sapiens
  source 1..23: mol_type = genomic DNA
ctcaggagggcgattggtccagg

SEQ ID NO: 4843 - DNA, 23 bp, Homo sapiens
  source 1..23: mol_type = genomic DNA
ctcaggagggcggttggtccagg

SEQ ID NO: 4844 - DNA, 23 bp, Homo sapiens
  source 1..23: mol_type = genomic DNA
ctcaggagggctattggtccagg

SEQ ID NO: 4845 - DNA, 23 bp, Homo sapiens
  source 1..23: mol_type = genomic DNA
ctcaggctgcgtgtaagtgatgg

SEQ ID NO: 4846 - DNA, 23 bp, Homo sapiens
  source 1..23: mol_type = genomic DNA
ctcaggctgcgtgtaagtggtgg

SEQ ID NO: 4847 - DNA, 23 bp, Homo sapiens
  source 1..23: mol_type = genomic DNA
ctcagggaaagcagaagtcctgg

SEQ ID NO: 4848 - DNA, 23 bp, Homo sapiens
  source 1..23: mol_type = genomic DNA
ctcagggtctcaggccccgaagg

SEQ ID NO: 4849 - DNA, 23 bp, Homo sapiens
  source 1..23: mol_type = genomic DNA
ctcagggtctcaggctccaaggg

SEQ ID NO: 4850 - DNA, 23 bp, Homo sapiens
  source 1..23: mol_type = genomic DNA
ctcagggtctcaggctccgaggg

SEQ ID NO: 4851 - DNA, 23 bp, Homo sapiens
  source 1..23: mol_type = genomic DNA
ctcaggtagggaaggggtgaggg

SEQ ID NO: 4852 - DNA, 23 bp, Homo sapiens
  source 1..23: mol_type = genomic DNA
ctcaggtggagaaggggtgaagg

SEQ ID NO: 4853 - DNA, 23 bp, Homo sapiens
  source 1..23: mol_type = genomic DNA
ctcaggtggggaagggatgaagg

SEQ ID NO: 4854 - DNA, 23 bp, Homo sapiens
  source 1..23: mol_type = genomic DNA
ctcaggtggggaaggggtgaagg

SEQ ID NO: 4855 - DNA, 23 bp, Homo sapiens
  source 1..23: mol_type = genomic DNA
ctcaggttgcgtgtaagtgatgg

SEQ ID NO: 4856 - DNA, 23 bp, Homo sapiens
  source 1..23: mol_type = genomic DNA
ctcagtgcaccatgaagttgagg

SEQ ID NO: 4857 - DNA, 23 bp, Homo sapiens
  source 1..23: mol_type = genomic DNA
ctcatcccattctccattcaagg

SEQ ID NO: 4858 - DNA, 23 bp, Homo sapiens
  source 1..23: mol_type = genomic DNA
ctcatcccccacggacggcccgg

SEQ ID NO: 4859 - DNA, 23 bp, Homo sapiens
  source 1..23: mol_type = genomic DNA
ctcatcccccacggacgggccgg

SEQ ID NO: 4860 - DNA, 23 bp, Homo sapiens
  source 1..23: mol_type = genomic DNA
ctcatgccattctccattcaagg

SEQ ID NO: 4861 - DNA, 23 bp, Homo sapiens
  source 1..23: mol_type = genomic DNA
ctcatgctcaatgtgtttgaagg

SEQ ID NO: 4862 - DNA, 23 bp, Homo sapiens
  source 1..23: mol_type = genomic DNA
ctcatggagtgggagactggggg

SEQ ID NO: 4863 - DNA, 23 bp, Homo sapiens
  source 1..23: mol_type = genomic DNA
ctcatggagtgggagcctggggg

SEQ ID NO: 4864 - DNA, 23 bp, Homo sapiens
  source 1..23: mol_type = genomic DNA
ctccacaagctccgtgtcctggg

SEQ ID NO: 4865 - DNA, 23 bp, Homo sapiens
  source 1..23: mol_type = genomic DNA
ctccacaagctcggtgtcctggg

SEQ ID NO: 4866 - DNA, 23 bp, Homo sapiens
  source 1..23: mol_type = genomic DNA
ctccacgagctccgtgtcctggg

SEQ ID NO: 4867 - DNA, 23 bp, Homo sapiens
  source 1..23: mol_type = genomic DNA
ctccagcgatcacagctccaagg

SEQ ID NO: 4868 - DNA, 23 bp, Homo sapiens
  source 1..23: mol_type = genomic DNA
ctccagtgatcacagctccaagg

SEQ ID NO: 4869 - DNA, 23 bp, Homo sapiens
  source 1..23: mol_type = genomic DNA
ctcccaaacacaatatcccaagg

SEQ ID NO: 4870 - DNA, 23 bp, Homo sapiens
  source 1..23: mol_type = genomic DNA
ctcccaaccacaatatcccaagg

SEQ ID NO: 4871 - DNA, 23 bp, Homo sapiens
  source 1..23: mol_type = genomic DNA
ctcccagcgcaagtgggaggcgg

SEQ ID NO: 4872 - DNA, 23 bp, Homo sapiens
  source 1..23: mol_type = genomic DNA
ctcccagcgcaagttggaggcgg

SEQ ID NO: 4873 - DNA, 23 bp, Homo sapiens
  source 1..23: mol_type = genomic DNA
ctccccagacgccgagatgcggg

SEQ ID NO: 4874 - DNA, 23 bp, Homo sapiens
  source 1..23: mol_type = genomic DNA
ctccccagaggccgagatgcggg

SEQ ID NO: 4875 - DNA, 23 bp, Homo sapiens
  source 1..23: mol_type = genomic DNA
ctccccagggtagaagcccaggg

SEQ ID NO: 4876 - DNA, 23 bp, Homo sapiens
  source 1..23: mol_type = genomic DNA
ctcccgagagcagcaggaggagg

SEQ ID NO: 4877 - DNA, 23 bp, Homo sapiens
  source 1..23: mol_type = genomic DNA
ctcccgagagcagcaggatgagg

SEQ ID NO: 4878 - DNA, 23 bp, Homo sapiens
  source 1..23: mol_type = genomic DNA
ctcccggggcaagggtctcgggg

SEQ ID NO: 4879 - DNA, 23 bp, Homo sapiens
  source 1..23: mol_type = genomic DNA
ctcccgggtcaagggtctcgggg

SEQ ID NO: 4880 - DNA, 23 bp, Homo sapiens
  source 1..23: mol_type = genomic DNA
ctcccgtagatctcccggcatgg

SEQ ID NO: 4881 - DNA, 23 bp, Homo sapiens
  source 1..23: mol_type = genomic DNA
ctcccgtagatctcccgggatgg

SEQ ID NO: 4882 - DNA, 23 bp, Homo sapiens
  source 1..23: mol_type = genomic DNA
ctccctcaggaccagagggaggg

SEQ ID NO: 4883 - DNA, 23 bp, Homo sapiens
  source 1..23: mol_type = genomic DNA
ctccctcaggagcagagggaggg

SEQ ID NO: 4884 - DNA, 23 bp, Homo sapiens
  source 1..23: mol_type = genomic DNA
ctccctccttaccccatctcagg

SEQ ID NO: 4885 - DNA, 23 bp, Homo sapiens
  source 1..23: mol_type = genomic DNA
ctccctccttttccacctgtggg

SEQ ID NO: 4886 - DNA, 23 bp, Homo sapiens
  source 1..23: mol_type = genomic DNA
ctccctccttttctaactgtggg

SEQ ID NO: 4887 - DNA, 23 bp, Homo sapiens
  source 1..23: mol_type = genomic DNA
ctccctccttttctatctgtggg

SEQ ID NO: 4888 - DNA, 23 bp, Homo sapiens
  source 1..23: mol_type = genomic DNA
ctccctctcccaacctacgtagg

SEQ ID NO: 4889 - DNA, 23 bp, Homo sapiens
  source 1..23: mol_type = genomic DNA
ctccctctcccaacctatgtagg

SEQ ID NO: 4890 - DNA, 23 bp, Homo sapiens
  source 1..23: mol_type = genomic DNA
ctccctctgccaacctatgtagg

SEQ ID NO: 4891 - DNA, 23 bp, Homo sapiens
  source 1..23: mol_type = genomic DNA
ctccgatgaccacaactgctagg

SEQ ID NO: 4892 - DNA, 23 bp, Homo sapiens
  source 1..23: mol_type = genomic DNA
ctccgcagacacctggagaacgg

SEQ ID NO: 4893 - DNA, 23 bp, Homo sapiens
  source 1..23: mol_type = genomic DNA
ctccgcagatacctgaagaacgg

SEQ ID NO: 4894 - DNA, 23 bp, Homo sapiens
  source 1..23: mol_type = genomic DNA
ctccgcagatacctgaagaatgg

SEQ ID NO: 4895 - DNA, 23 bp, Homo sapiens
  source 1..23: mol_type = genomic DNA
ctccgcagatacctggagaacgg

SEQ ID NO: 4896 - DNA, 23 bp, Homo sapiens
  source 1..23: mol_type = genomic DNA
ctccgcagggtagaaacccaggg

SEQ ID NO: 4897 - DNA, 23 bp, Homo sapiens
  source 1..23: mol_type = genomic DNA
ctccgcagggtagaagcccaggg

SEQ ID NO: 4898 - DNA, 23 bp, Homo sapiens
  source 1..23: mol_type = genomic DNA
ctccgcagggtagaagctcaggg

SEQ ID NO: 4899 - DNA, 23 bp, Homo sapiens
  source 1..23: mol_type = genomic DNA
ctccgcggatacctggagaacgg

SEQ ID NO: 4900 - DNA, 23 bp, Homo sapiens
  source 1..23: mol_type = genomic DNA
ctccggccgagggtctgggcggg

SEQ ID NO: 4901 - DNA, 23 bp, Homo sapiens
  source 1..23: mol_type = genomic DNA
ctccggtcgagggtctgggcggg

SEQ ID NO: 4902 - DNA, 23 bp, Homo sapiens
  source 1..23: mol_type = genomic DNA
ctccgtagggtagaagcccaggg

SEQ ID NO: 4903 - DNA, 23 bp, Homo sapiens
  source 1..23: mol_type = genomic DNA
ctcctagtcttggacccaaaagg

SEQ ID NO: 4904 - DNA, 23 bp, Homo sapiens
  source 1..23: mol_type = genomic DNA
ctcctatagatctcccgggatgg

SEQ ID NO: 4905 - DNA, 23 bp, Homo sapiens
  source 1..23: mol_type = genomic DNA
ctcctataggtcgccggggatgg

SEQ ID NO: 4906 - DNA, 23 bp, Homo sapiens
  source 1..23: mol_type = genomic DNA
ctcctcacattaggctaacaggg

SEQ ID NO: 4907 - DNA, 23 bp, Homo sapiens
  source 1..23: mol_type = genomic DNA
ctcctcacattatgctaacaggg

SEQ ID NO: 4908 - DNA, 23 bp, Homo sapiens
  source 1..23: mol_type = genomic DNA
ctcctcagacaccgagatgcggg

SEQ ID NO: 4909 - DNA, 23 bp, Homo sapiens
  source 1..23: mol_type = genomic DNA
ctcctcagacgccaagatgctgg

SEQ ID NO: 4910 - DNA, 23 bp, Homo sapiens
  source 1..23: mol_type = genomic DNA
ctcctcagacgccgagatgcggg

SEQ ID NO: 4911 - DNA, 23 bp, Homo sapiens
  source 1..23: mol_type = genomic DNA
ctcctcagacgccgagatgctgg

SEQ ID NO: 4912 - DNA, 23 bp, Homo sapiens
  source 1..23: mol_type = genomic DNA
ctcctccaggcgcggcttcccgg

SEQ ID NO: 4913 - DNA, 23 bp, Homo sapiens
  source 1..23: mol_type = genomic DNA
ctcctcccagtcccctcataggg

SEQ ID NO: 4914 - DNA, 23 bp, Homo sapiens
  source 1..23: mol_type = genomic DNA
ctcctcccggcgcggctacccgg

SEQ ID NO: 4915 - DNA, 23 bp, Homo sapiens
  source 1..23: mol_type = genomic DNA
ctcctcccggcgcggctccccgg

SEQ ID NO: 4916 - DNA, 23 bp, Homo sapiens
  source 1..23: mol_type = genomic DNA
ctcctcccggcgcggcttcccgg

SEQ ID NO: 4917 - DNA, 23 bp, Homo sapiens
  source 1..23: mol_type = genomic DNA
ctcctccctgcgcggctccccgg

SEQ ID NO: 4918 - DNA, 23 bp, Homo sapiens
  source 1..23: mol_type = genomic DNA
ctcctccctgtcccctcacaggg

SEQ ID NO: 4919 - DNA, 23 bp, Homo sapiens
  source 1..23: mol_type = genomic DNA
ctcctcctgctgctctcgggagg

SEQ ID NO: 4920 - DNA, 23 bp, Homo sapiens
  source 1..23: mol_type = genomic DNA
ctcctcgtcttggaaccaaaagg

SEQ ID NO: 4921 - DNA, 23 bp, Homo sapiens
  source 1..23: mol_type = genomic DNA
ctcctcgtcttggacccaaaagg

SEQ ID NO: 4922 - DNA, 23 bp, Homo sapiens
  source 1..23: mol_type = genomic DNA
ctcctcgtggaaggccatcccgg

SEQ ID NO: 4923 - DNA, 23 bp, Homo sapiens
  source 1..23: mol_type = genomic DNA
ctcctcgtgggaggccatcccgg

SEQ ID NO: 4924 - DNA, 23 bp, Homo sapiens
  source 1..23: mol_type = genomic DNA
ctcctcgtgggaggccatgccgg

SEQ ID NO: 4925 - DNA, 23 bp, Homo sapiens
  source 1..23: mol_type = genomic DNA
ctcctggaccgccgcggacaagg

SEQ ID NO: 4926 - DNA, 23 bp, Homo sapiens
  source 1..23: mol_type = genomic DNA
ctcctggaccgccgcggacacgg

SEQ ID NO: 4927 - DNA, 23 bp, Homo sapiens
  source 1..23: mol_type = genomic DNA
ctcctggaccgcggcggacacgg

SEQ ID NO: 4928 - DNA, 23 bp, Homo sapiens
  source 1..23: mol_type = genomic DNA
ctcctggaccgcggcggacatgg

SEQ ID NO: 4929 - DNA, 23 bp, Homo sapiens
  source 1..23: mol_type = genomic DNA
ctcctggaccgctgcggacacgg

SEQ ID NO: 4930 - DNA, 23 bp, Homo sapiens
  source 1..23: mol_type = genomic DNA
ctcctggactgccgcggacacgg

SEQ ID NO: 4931 - DNA, 23 bp, Homo sapiens
  source 1..23: mol_type = genomic DNA
ctcctgtagatctcccgggatgg

SEQ ID NO: 4932 - DNA, 23 bp, Homo sapiens
  source 1..23: mol_type = genomic DNA
ctcctgtcccacgtctcctgagg

SEQ ID NO: 4933 - DNA, 23 bp, Homo sapiens
  source 1..23: mol_type = genomic DNA
ctcctgtcccacgtctcctgcgg

SEQ ID NO: 4934 - DNA, 23 bp, Homo sapiens
  source 1..23: mol_type = genomic DNA
ctcctgtcccacgtctcctgtgg

SEQ ID NO: 4935 - DNA, 23 bp, Homo sapiens
  source 1..23: mol_type = genomic DNA
ctccttggagctgtgatcactgg

SEQ ID NO: 4936 - DNA, 23 bp, Homo sapiens
  source 1..23: mol_type = genomic DNA
ctccttggagctgtgatcgctgg

SEQ ID NO: 4937 - DNA, 23 bp, Homo sapiens
  source 1..23: mol_type = genomic DNA
ctccttgtgggaggccagcccgg

SEQ ID NO: 4938 - DNA, 23 bp, Homo sapiens
  source 1..23: mol_type = genomic DNA
ctcggagtcccgcggcttcgggg

SEQ ID NO: 4939 - DNA, 23 bp, Homo sapiens
  source 1..23: mol_type = genomic DNA
ctcggggaggatctcagaccggg

SEQ ID NO: 4940 - DNA, 23 bp, Homo sapiens
  source 1..23: mol_type = genomic DNA
ctcgggggacgggctgaccacgg

SEQ ID NO: 4941 - DNA, 23 bp, Homo sapiens
  source 1..23: mol_type = genomic DNA
ctcggggtcccgcggcttcgggg

SEQ ID NO: 4942 - DNA, 23 bp, Homo sapiens
  source 1..23: mol_type = genomic DNA
ctcggggtggatctcagacccgg

SEQ ID NO: 4943 - DNA, 23 bp, Homo sapiens
  source 1..23: mol_type = genomic DNA
ctcggggtggatctcagaccggg

SEQ ID NO: 4944 - DNA, 23 bp, Homo sapiens
  source 1..23: mol_type = genomic DNA
ctcggggtggatctcagacgggg

SEQ ID NO: 4945 - DNA, 23 bp, Homo sapiens
  source 1..23: mol_type = genomic DNA
ctcgtggagaccaggcctgcagg

SEQ ID NO: 4946 - DNA, 23 bp, Homo sapiens
  source 1..23: mol_type = genomic DNA
ctctagaacccgacacccaatgg

SEQ ID NO: 4947 - DNA, 23 bp, Homo sapiens
  source 1..23: mol_type = genomic DNA
ctctagaatccgacacccaatgg

SEQ ID NO: 4948 - DNA, 23 bp, Homo sapiens
  source 1..23: mol_type = genomic DNA
ctctcaactgctccgccacacgg

SEQ ID NO: 4949 - DNA, 23 bp, Homo sapiens
  source 1..23: mol_type = genomic DNA
ctctcaactgctccgccacatgg

SEQ ID NO: 4950 - DNA, 23 bp, Homo sapiens
  source 1..23: mol_type = genomic DNA
ctctcaactgctccgcccaacgg

SEQ ID NO: 4951 - DNA, 23 bp, Homo sapiens
  source 1..23: mol_type = genomic DNA
ctctcaactgctccgcccgacgg

SEQ ID NO: 4952 - DNA, 23 bp, Homo sapiens
  source 1..23: mol_type = genomic DNA
ctctcaactgctccgcctcatgg

SEQ ID NO: 4953 - DNA, 23 bp, Homo sapiens
  source 1..23: mol_type = genomic DNA
ctctcagctgctccgccacacgg

SEQ ID NO: 4954 - DNA, 23 bp, Homo sapiens
  source 1..23: mol_type = genomic DNA
ctctcagctgctccgcccgacgg

SEQ ID NO: 4955 - DNA, 23 bp, Homo sapiens
  source 1..23: mol_type = genomic DNA
ctctcagctgctccgccgcacgg

SEQ ID NO: 4956 - DNA, 23 bp, Homo sapiens
  source 1..23: mol_type = genomic DNA
ctctcagctgctccgccgtacgg

SEQ ID NO: 4957 - DNA, 23 bp, Homo sapiens
  source 1..23: mol_type = genomic DNA
ctctcagctgctccgcctcacgg

SEQ ID NO: 4958 - DNA, 23 bp, Homo sapiens
  source 1..23: mol_type = genomic DNA
ctctccactgctccgccacatgg

SEQ ID NO: 4959 - DNA, 23 bp, Homo sapiens
  source 1..23: mol_type = genomic DNA
ctctccactgctccgccgcacgg

SEQ ID NO: 4960 - DNA, 23 bp, Homo sapiens
  source 1..23: mol_type = genomic DNA
ctctccactgctccgcctcacgg

SEQ ID NO: 4961 - DNA, 23 bp, Homo sapiens
  source 1..23: mol_type = genomic DNA
ctctccactgctccgcctcatgg

SEQ ID NO: 4962 - DNA, 23 bp, Homo sapiens
  source 1..23: mol_type = genomic DNA
ctctccccatcccccacggacgg

SEQ ID NO: 4963 - DNA, 23 bp, Homo sapiens
  source 1..23: mol_type = genomic DNA
ctctcccgggacaagggtctcgg

SEQ ID NO: 4964 - DNA, 23 bp, Homo sapiens
  source 1..23: mol_type = genomic DNA
ctctcccggggcaagggtctcgg

SEQ ID NO: 4965 - DNA, 23 bp, Homo sapiens
  source 1..23: mol_type = genomic DNA
ctctcccgggtcaagggtctcgg

SEQ ID NO: 4966 - DNA, 23 bp, Homo sapiens
  source 1..23: mol_type = genomic DNA
ctctccgctgctccgccacacgg

SEQ ID NO: 4967 - DNA, 23 bp, Homo sapiens
  source 1..23: mol_type = genomic DNA
ctctccgctgctccgccgcatgg

SEQ ID NO: 4968 - DNA, 23 bp, Homo sapiens
  source 1..23: mol_type = genomic DNA
ctctccgctgctccgcctcacgg

SEQ ID NO: 4969 - DNA, 23 bp, Homo sapiens
  source 1..23: mol_type = genomic DNA
ctctcgccggtcgagggtctggg

SEQ ID NO: 4970 - DNA, 23 bp, Homo sapiens
  source 1..23: mol_type = genomic DNA
ctctcgccggtcgagggtttggg

SEQ ID NO: 4971 - DNA, 23 bp, Homo sapiens
  source 1..23: mol_type = genomic DNA
ctctcggtaagtctgcgcggagg

SEQ ID NO: 4972 - DNA, 23 bp, Homo sapiens
  source 1..23: mol_type = genomic DNA
ctctcggtaagtctgtgtgttgg

SEQ ID NO: 4973 - DNA, 23 bp, Homo sapiens
  source 1..23: mol_type = genomic DNA
ctctcggtcagtctgtgactggg

SEQ ID NO: 4974 - DNA, 23 bp, Homo sapiens
  source 1..23: mol_type = genomic DNA
ctctcggtcagtctgtgagtggg

SEQ ID NO: 4975 - DNA, 23 bp, Homo sapiens
  source 1..23: mol_type = genomic DNA
ctctcggtcagtctgtgcctggg

SEQ ID NO: 4976 - DNA, 23 bp, Homo sapiens
  source 1..23: mol_type = genomic DNA
ctctcggtcagtctgtgccttgg

SEQ ID NO: 4977 - DNA, 23 bp, Homo sapiens
  source 1..23: mol_type = genomic DNA
ctctcggtcagtctgtgtgttgg

SEQ ID NO: 4978 - DNA, 23 bp, Homo sapiens
  source 1..23: mol_type = genomic DNA
ctctctccggccgagggtctggg

SEQ ID NO: 4979 - DNA, 23 bp, Homo sapiens
  source 1..23: mol_type = genomic DNA
ctctctccggtcgagggtctggg

SEQ ID NO: 4980 - DNA, 23 bp, Homo sapiens
  source 1..23: mol_type = genomic DNA
ctctctgctgctccgccacatgg

SEQ ID NO: 4981 - DNA, 23 bp, Homo sapiens
  source 1..23: mol_type = genomic DNA
ctctctgctgctccgccgcacgg

SEQ ID NO: 4982 - DNA, 23 bp, Homo sapiens
  source 1..23: mol_type = genomic DNA
ctctctgctgctccgccgcatgg

SEQ ID NO: 4983 - DNA, 23 bp, Homo sapiens
  source 1..23: mol_type = genomic DNA
ctctctggagacctttagcaggg

SEQ ID NO: 4984 - DNA, 23 bp, Homo sapiens
  source 1..23: mol_type = genomic DNA
ctctgacctttagcagggtcagg

SEQ ID NO: 4985 - DNA, 23 bp, Homo sapiens
  source 1..23: mol_type = genomic DNA
ctctgaggtccaagacttggagg

SEQ ID NO: 4986 - DNA, 23 bp, Homo sapiens
  source 1..23: mol_type = genomic DNA
ctctgcagggtagaagcccaggg

SEQ ID NO: 4987 - DNA, 23 bp, Homo sapiens
  source 1..23: mol_type = genomic DNA
ctctgccaagtgtgagaccctgg

SEQ ID NO: 4988 - DNA, 23 bp, Homo sapiens
  source 1..23: mol_type = genomic DNA
ctctggaaggtgtgagaccctgg

SEQ ID NO: 4989 - DNA, 23 bp, Homo sapiens
  source 1..23: mol_type = genomic DNA
ctctggacggtgtgagaacctgg

SEQ ID NO: 4990 - DNA, 23 bp, Homo sapiens
  source 1..23: mol_type = genomic DNA
ctctggaggatgtgagaccctgg

SEQ ID NO: 4991 - DNA, 23 bp, Homo sapiens
  source 1..23: mol_type = genomic DNA
ctctggagggtgtgagaacctgg

SEQ ID NO: 4992 - DNA, 23 bp, Homo sapiens
  source 1..23: mol_type = genomic DNA
ctctggagggtgtgagaccctgg

SEQ ID NO: 4993 - DNA, 23 bp, Homo sapiens
  source 1..23: mol_type = genomic DNA
ctctggatgatgtgagaccctgg

SEQ ID NO: 4994 - DNA, 23 bp, Homo sapiens
  source 1..23: mol_type = genomic DNA
ctctggatggtgtgagaacctgg

SEQ ID NO: 4995 - DNA, 23 bp, Homo sapiens
  source 1..23: mol_type = genomic DNA
ctctggatggtgtgagaccctgg

SEQ ID NO: 4996 - DNA, 23 bp, Homo sapiens
  source 1..23: mol_type = genomic DNA
ctctggccctgacccagacctgg

SEQ ID NO: 4997 - DNA, 23 bp, Homo sapiens
  source 1..23: mol_type = genomic DNA
ctctggggagaatgtgagtccgg

SEQ ID NO: 4998 - DNA, 23 bp, Homo sapiens
  source 1..23: mol_type = genomic DNA
ctctggggtccaagactaggagg

SEQ ID NO: 4999 - DNA, 23 bp, Homo sapiens
  source 1..23: mol_type = genomic DNA
ctctggggtccaaggctacgagg

SEQ ID NO: 5000 - DNA, 23 bp, Homo sapiens
  source 1..23: mol_type = genomic DNA
ctctgggtctcaagctcccaggg

SEQ ID NO: 5001 - DNA, 23 bp, Homo sapiens
  source 1..23: mol_type = genomic DNA
ctctgtcctgctccgccacacgg

SEQ ID NO: 5002 - DNA, 23 bp, Homo sapiens
  source 1..23: mol_type = genomic DNA
ctctgtcctgctccgccgcacgg

SEQ ID NO: 5003 - DNA, 23 bp, Homo sapiens
  source 1..23: mol_type = genomic DNA
ctcttctctctagacaattaagg

SEQ ID NO: 5004 - DNA, 23 bp, Homo sapiens
  source 1..23: mol_type = genomic DNA
ctcttgaagtcacaaaggaaagg

SEQ ID NO: 5005 - DNA, 23 bp, Homo sapiens
  source 1..23: mol_type = genomic DNA
ctcttgaagtcacaaaggagagg

SEQ ID NO: 5006 - DNA, 23 bp, Homo sapiens
  source 1..23: mol_type = genomic DNA
ctcttgaagtcacaaaggggagg

SEQ ID NO: 5007 - DNA, 23 bp, Homo sapiens
  source 1..23: mol_type = genomic DNA
ctcttggaccgcggcggacatgg

SEQ ID NO: 5008 - DNA, 23 bp, Homo sapiens
  source 1..23: mol_type = genomic DNA
ctcttgggtccaagactaggagg

SEQ ID NO: 5009 - DNA, 23 bp, Homo sapiens
  source 1..23: mol_type = genomic DNA
ctcttgtcccacatctcctgcgg

SEQ ID NO: 5010 - DNA, 23 bp, Homo sapiens
  source 1..23: mol_type = genomic DNA
ctcttgtcccacatctcctgtgg

SEQ ID NO: 5011 - DNA, 23 bp, Homo sapiens
  source 1..23: mol_type = genomic DNA
ctctttggagctatgttcgctgg

SEQ ID NO: 5012 - DNA, 23 bp, Homo sapiens
  source 1..23: mol_type = genomic DNA
ctctttggagctgtgatcactgg

SEQ ID NO: 5013 - DNA, 23 bp, Homo sapiens
  source 1..23: mol_type = genomic DNA
ctctttggagctgtgatcgctgg

SEQ ID NO: 5014 - DNA, 23 bp, Homo sapiens
  source 1..23: mol_type = genomic DNA
ctctttggagctgtgttcgctgg

SEQ ID NO: 5015 - DNA, 23 bp, Homo sapiens
  source 1..23: mol_type = genomic DNA
ctgaaaatgaaaccggctaaagg

SEQ ID NO: 5016 - DNA, 23 bp, Homo sapiens
  source 1..23: mol_type = genomic DNA
ctgaaaatgaaaccgggtaaagg

SEQ ID NO: 5017 - DNA, 23 bp, Homo sapiens
  source 1..23: mol_type = genomic DNA
ctgaaaatgaaaccgggttaagg

SEQ ID NO: 5018 - DNA, 23 bp, Homo sapiens
  source 1..23: mol_type = genomic DNA
ctgaagcaactgccctcctaagg

SEQ ID NO: 5019 - DNA, 23 bp, Homo sapiens
  source 1..23: mol_type = genomic DNA
ctgaccacgggggcggggccagg

SEQ ID NO: 5020 - DNA, 23 bp, Homo sapiens
  source 1..23: mol_type = genomic DNA
ctgaccatgaagccaccctgagg

SEQ ID NO: 5021 - DNA, 23 bp, Homo sapiens
  source 1..23: mol_type = genomic DNA
ctgaccatgaggccaccctgagg

SEQ ID NO: 5022 - DNA, 23 bp, Homo sapiens
  source 1..23: mol_type = genomic DNA
ctgaccatgaggccactctgagg

SEQ ID NO: 5023 - DNA, 23 bp, Homo sapiens
  source 1..23: mol_type = genomic DNA
ctgaccatgaggtcaccctgagg

SEQ ID NO: 5024 - DNA, 23 bp, Homo sapiens
  source 1..23: mol_type = genomic DNA
ctgaccgcggggccggggccagg

SEQ ID NO: 5025 - DNA, 23 bp, Homo sapiens
  source 1..23: mol_type = genomic DNA
ctgaccgcggggcctgggccagg

SEQ ID NO: 5026 - DNA, 23 bp, Homo sapiens
  source 1..23: mol_type = genomic DNA
ctgaccgcgggggcggggccagg

SEQ ID NO: 5027 - DNA, 23 bp, Homo sapiens
  source 1..23: mol_type = genomic DNA
ctgaccgcggggtccgggccagg

SEQ ID NO: 5028 - DNA, 23 bp, Homo sapiens
  source 1..23: mol_type = genomic DNA
ctgaccgcggggtcggggccagg

SEQ ID NO: 5029 - DNA, 23 bp, Homo sapiens
  source 1..23: mol_type = genomic DNA
ctgaccgtggggtcggggccagg

SEQ ID NO: 5030 - DNA, 23 bp, Homo sapiens
  source 1..23: mol_type = genomic DNA
ctgacctcggggtccgggccagg

SEQ ID NO: 5031 - DNA, 23 bp, Homo sapiens
  source 1..23: mol_type = genomic DNA
ctgacctgagtggaggccgaagg

SEQ ID NO: 5032 - DNA, 23 bp, Homo sapiens
  source 1..23: mol_type = genomic DNA
ctgacctgagtggaggctgaagg

SEQ ID NO: 5033 - DNA, 23 bp, Homo sapiens
  source 1..23: mol_type = genomic DNA
ctgacctgagtggaggctgaggg

SEQ ID NO: 5034 - DNA, 23 bp, Homo sapiens
  source 1..23: mol_type = genomic DNA
ctgacctgagtggaggctgcagg

SEQ ID NO: 5035 - DNA, 23 bp, Homo sapiens
  source 1..23: mol_type = genomic DNA
ctgacctgcgcccccggccgggg

SEQ ID NO: 5036 - DNA, 23 bp, Homo sapiens
  source 1..23: mol_type = genomic DNA
ctgacgctcaatgtgtttgaagg

SEQ ID NO: 5037 - DNA, 23 bp, Homo sapiens
  source 1..23: mol_type = genomic DNA
ctgagaacggacaggacacctgg

SEQ ID NO: 5038 - DNA, 23 bp, Homo sapiens
  source 1..23: mol_type = genomic DNA
ctgagaatggacaggacacctgg

SEQ ID NO: 5039 - DNA, 23 bp, Homo sapiens
  source 1..23: mol_type = genomic DNA
ctgagaatggacgggacacctgg

SEQ ID NO: 5040 - DNA, 23 bp, Homo sapiens
  source 1..23: mol_type = genomic DNA
ctgagaatgggcaggacacctgg

SEQ ID NO: 5041 - DNA, 23 bp, Homo sapiens
  source 1..23: mol_type = genomic DNA
ctgagacagctgtcttgtgaggg

SEQ ID NO: 5042 - DNA, 23 bp, Homo sapiens
  source 1..23: mol_type = genomic DNA
ctgagccgccatgtccgccgcgg

SEQ ID NO: 5043 - DNA, 23 bp, Homo sapiens
  source 1..23: mol_type = genomic DNA
ctgagccgccgtgtccgcagcgg

SEQ ID NO: 5044 - DNA, 23 bp, Homo sapiens
  source 1..23: mol_type = genomic DNA
ctgagccgccgtgtccgccgcgg

SEQ ID NO: 5045 - DNA, 23 bp, Homo sapiens
  source 1..23: mol_type = genomic DNA
ctgagccgccgtgtccgcggcgg

SEQ ID NO: 5046 - DNA, 23 bp, Homo sapiens
  source 1..23: mol_type = genomic DNA
ctgagccgccttgtccgcggcgg

SEQ ID NO: 5047 - DNA, 23 bp, Homo sapiens
  source 1..23: mol_type = genomic DNA
ctgagccgcggtgtccgccgcgg

SEQ ID NO: 5048 - DNA, 23 bp, Homo sapiens
  source 1..23: mol_type = genomic DNA
ctgagccgcggtgtccgcggcgg

SEQ ID NO: 5049 - DNA, 23 bp, Homo sapiens
  source 1..23: mol_type = genomic DNA
ctgagccgctgtgtccgcggcgg

SEQ ID NO: 5050 - DNA, 23 bp, Homo sapiens
  source 1..23: mol_type = genomic DNA
ctgagctgccatgtccgccgcgg

SEQ ID NO: 5051 - DNA, 23 bp, Homo sapiens
  source 1..23: mol_type = genomic DNA
ctgagggagaggaatcctcctgg

SEQ ID NO: 5052 - DNA, 23 bp, Homo sapiens
  source 1..23: mol_type = genomic DNA
ctgaggtccttgggatattgtgg

SEQ ID NO: 5053 - DNA, 23 bp, Homo sapiens
  source 1..23: mol_type = genomic DNA
ctgagtccgggtgggtgactggg

SEQ ID NO: 5054 - DNA, 23 bp, Homo sapiens
  source 1..23: mol_type = genomic DNA
ctgagtccgggtgggtgcgtggg

SEQ ID NO: 5055 - DNA, 23 bp, Homo sapiens
  source 1..23: mol_type = genomic DNA
ctgagttttcttgtcccactggg

SEQ ID NO: 5056 - DNA, 23 bp, Homo sapiens
  source 1..23: mol_type = genomic DNA
ctgatcgcctatagatctcccgg

SEQ ID NO: 5057 - DNA, 23 bp, Homo sapiens
  source 1..23: mol_type = genomic DNA
ctgatcgcctgtagatctcccgg

SEQ ID NO: 5058 - DNA, 23 bp, Homo sapiens
  source 1..23: mol_type = genomic DNA
ctgatcgcctgtaggtctcccgg

SEQ ID NO: 5059 - DNA, 23 bp, Homo sapiens
  source 1..23: mol_type = genomic DNA
ctgatgtgtgttgggtgttgggg

SEQ ID NO: 5060 - DNA, 23 bp, Homo sapiens
  source 1..23: mol_type = genomic DNA
ctgcaacaggaaagatgattggg

SEQ ID NO: 5061 - DNA, 23 bp, Homo sapiens
  source 1..23: mol_type = genomic DNA
ctgcacaaaagagtaagtgctgg

SEQ ID NO: 5062 - DNA, 23 bp, Homo sapiens
  source 1..23: mol_type = genomic DNA
ctgcacaaaagagtaagttctgg

SEQ ID NO: 5063 - DNA, 23 bp, Homo sapiens
  source 1..23: mol_type = genomic DNA
ctgcaccctgagatggagtaagg

SEQ ID NO: 5064 - DNA, 23 bp, Homo sapiens
  source 1..23: mol_type = genomic DNA
ctgcagagatcacactgacctgg

SEQ ID NO: 5065 - DNA, 23 bp, Homo sapiens
  source 1..23: mol_type = genomic DNA
ctgcagcctccactcaggtcagg

SEQ ID NO: 5066 - DNA, 23 bp, Homo sapiens
  source 1..23: mol_type = genomic DNA
ctgcagcgcacgggtaccagggg

SEQ ID NO: 5067 - DNA, 23 bp, Homo sapiens
  source 1..23: mol_type = genomic DNA
ctgcagcgcacgggtaccggggg

SEQ ID NO: 5068 - DNA, 23 bp, Homo sapiens
  source 1..23: mol_type = genomic DNA
ctgcagcgcgcaggtaccagggg

SEQ ID NO: 5069 - DNA, 23 bp, Homo sapiens
  source 1..23: mol_type = genomic DNA
ctgcagcgcgcgggtaccagggg

SEQ ID NO: 5070 - DNA, 23 bp, Homo sapiens
  source 1..23: mol_type = genomic DNA
ctgcatcccagtaatgaggcagg

SEQ ID NO: 5071 - DNA, 23 bp, Homo sapiens
  source 1..23: mol_type = genomic DNA
ctgccccccagagcagcaggagg

SEQ ID NO: 5072 - DNA, 23 bp, Homo sapiens
  source 1..23: mol_type = genomic DNA
ctgcccggccccgaccaacccgg

SEQ ID NO: 5073 - DNA, 23 bp, Homo sapiens
  source 1..23: mol_type = genomic DNA
ctgccgccggtgtgtgtcaaagg

SEQ ID NO: 5074 - DNA, 23 bp, Homo sapiens
  source 1..23: mol_type = genomic DNA
ctgccttgtgtgggactgagagg

SEQ ID NO: 5075 - DNA, 23 bp, Homo sapiens
  source 1..23: mol_type = genomic DNA
ctgcggagatcacactgacctgg

SEQ ID NO: 5076 - DNA, 23 bp, Homo sapiens
  source 1..23: mol_type = genomic DNA
ctgcgtccaggctggtgtctggg

SEQ ID NO: 5077 - DNA, 23 bp, Homo sapiens
  source 1..23: mol_type = genomic DNA
ctgcgtgtaagtgatggcagtgg

SEQ ID NO: 5078 - DNA, 23 bp, Homo sapiens
  source 1..23: mol_type = genomic DNA
ctgcgtgtaagtgatggcggcgg

SEQ ID NO: 5079 - DNA, 23 bp, Homo sapiens
  source 1..23: mol_type = genomic DNA
ctgcgtgtaagtgatggcggtgg

SEQ ID NO: 5080 - DNA, 23 bp, Homo sapiens
  source 1..23: mol_type = genomic DNA
ctgcgtgtaagtgatgggggcgg

SEQ ID NO: 5081 - DNA, 23 bp, Homo sapiens
  source 1..23: mol_type = genomic DNA
ctgcgtgtaagtgatgggggtgg

SEQ ID NO: 5082 - DNA, 23 bp, Homo sapiens
  source 1..23: mol_type = genomic DNA
ctgcgtgtaagtggtgggggtgg

SEQ ID NO: 5083 - DNA, 23 bp, Homo sapiens
  source 1..23: mol_type = genomic DNA
ctgctccacccacggcgcccggg

SEQ ID NO: 5084 - DNA, 23 bp, Homo sapiens
  source 1..23: mol_type = genomic DNA
ctgctctatccacggcgcccggg

SEQ ID NO: 5085 - DNA, 23 bp, Homo sapiens
  source 1..23: mol_type = genomic DNA
ctgctctatccatggcgcccagg

SEQ ID NO: 5086 - DNA, 23 bp, Homo sapiens
  source 1..23: mol_type = genomic DNA
ctgctctatccatggcgcccggg

SEQ ID NO: 5087 - DNA, 23 bp, Homo sapiens
  source 1..23: mol_type = genomic DNA
ctgctctctaggacaattaaggg

SEQ ID NO: 5088 - DNA, 23 bp, Homo sapiens
  source 1..23: mol_type = genomic DNA
ctgctctctgacacaattaaggg

SEQ ID NO: 5089 - DNA, 23 bp, Homo sapiens
  source 1..23: mol_type = genomic DNA
ctgctctctgactcaattaaggg

SEQ ID NO: 5090 - DNA, 23 bp, Homo sapiens
  source 1..23: mol_type = genomic DNA
ctgctctgtgacacaattaaggg

SEQ ID NO: 5091 - DNA, 23 bp, Homo sapiens
  source 1..23: mol_type = genomic DNA
ctgctgccggtgtgtgtcaaagg

SEQ ID NO: 5092 - DNA, 23 bp, Homo sapiens
  source 1..23: mol_type = genomic DNA
ctgctgcctgtgtgtgtcaaagg

SEQ ID NO: 5093 - DNA, 23 bp, Homo sapiens
  source 1..23: mol_type = genomic DNA
ctgcttcccagtaatgaggcagg

SEQ ID NO: 5094 - DNA, 23 bp, Homo sapiens
  source 1..23: mol_type = genomic DNA
ctgcttcccagtaatgatgcagg

SEQ ID NO: 5095 - DNA, 23 bp, Homo sapiens
  source 1..23: mol_type = genomic DNA
ctggaaacccgacacccaatggg

SEQ ID NO: 5096 - DNA, 23 bp, Homo sapiens
  source 1..23: mol_type = genomic DNA
ctggaacaggaaagatgattggg

SEQ ID NO: 5097 - DNA, 23 bp, Homo sapiens
  source 1..23: mol_type = genomic DNA
ctggaagaaggacccgacacagg

SEQ ID NO: 5098 - DNA, 23 bp, Homo sapiens
  source 1..23: mol_type = genomic DNA
ctggaagaaggacccgacatagg

SEQ ID NO: 5099 - DNA, 23 bp, Homo sapiens
  source 1..23: mol_type = genomic DNA
ctggaagcaccatccacacatgg

SEQ ID NO: 5100 - DNA, 23 bp, Homo sapiens
  source 1..23: mol_type = genomic DNA
ctggaagcaccatccacacctgg

SEQ ID NO: 5101 - DNA, 23 bp, Homo sapiens
  source 1..23: mol_type = genomic DNA
ctggaagcaccatccacacgtgg

SEQ ID NO: 5102 - DNA, 23 bp, Homo sapiens
  source 1..23: mol_type = genomic DNA
ctggaccaaccgccctcctgagg

SEQ ID NO: 5103 - DNA, 23 bp, Homo sapiens
  source 1..23: mol_type = genomic DNA
ctggaccaactgccctcctaagg

SEQ ID NO: 5104 - DNA, 23 bp, Homo sapiens
  source 1..23: mol_type = genomic DNA
ctggaccaactgctctcctaagg

SEQ ID NO: 5105 - DNA, 23 bp, Homo sapiens
  source 1..23: mol_type = genomic DNA
ctggaccaatagccctcctgagg

SEQ ID NO: 5106 - DNA, 23 bp, Homo sapiens
  source 1..23: mol_type = genomic DNA
ctggaccgccgcggacaaggcgg

SEQ ID NO: 5107 - DNA, 23 bp, Homo sapiens
  source 1..23: mol_type = genomic DNA
ctggaccgccgcggacacagcgg

SEQ ID NO: 5108 - DNA, 23 bp, Homo sapiens
  source 1..23: mol_type = genomic DNA
ctggaccgccgcggacaccgcgg

SEQ ID NO: 5109 - DNA, 23 bp, Homo sapiens
  source 1..23: mol_type = genomic DNA
ctggaccgccgcggacacggcgg

SEQ ID NO: 5110 - DNA, 23 bp, Homo sapiens
  source 1..23: mol_type = genomic DNA
ctggaccgcggcggacaccgcgg

SEQ ID NO: 5111 - DNA, 23 bp, Homo sapiens
  source 1..23: mol_type = genomic DNA
ctggaccgcggcggacacggcgg

SEQ ID NO: 5112 - DNA, 23 bp, Homo sapiens
  source 1..23: mol_type = genomic DNA
ctggaccgctgcggacacggcgg

SEQ ID NO: 5113 - DNA, 23 bp, Homo sapiens
  source 1..23: mol_type = genomic DNA
ctggactgccgcggacacggcgg

SEQ ID NO: 5114 - DNA, 23 bp, Homo sapiens
  source 1..23: mol_type = genomic DNA
ctggagcaactgccctcctaagg

SEQ ID NO: 5115 - DNA, 23 bp, Homo sapiens
  source 1..23: mol_type = genomic DNA
ctggagcgcgcgggtaccagggg

SEQ ID NO: 5116 - DNA, 23 bp, Homo sapiens
  source 1..23: mol_type = genomic DNA
ctggagcgcgctggtaccagggg

SEQ ID NO: 5117 - DNA, 23 bp, Homo sapiens
  source 1..23: mol_type = genomic DNA
ctggagggcacgtgcgtggacgg

SEQ ID NO: 5118 - DNA, 23 bp, Homo sapiens
  source 1..23: mol_type = genomic DNA
ctggagggccggtgcgtggacgg

SEQ ID NO: 5119 - DNA, 23 bp, Homo sapiens
  source 1..23: mol_type = genomic DNA
ctggagggcctgatgtgtgttgg

SEQ ID NO: 5120 - DNA, 23 bp, Homo sapiens
  source 1..23: mol_type = genomic DNA
ctggagggcgagtgcgtggacgg

SEQ ID NO: 5121 - DNA, 23 bp, Homo sapiens
  source 1..23: mol_type = genomic DNA
ctggcacacagggcccagactgg

SEQ ID NO: 5122 - DNA, 23 bp, Homo sapiens
  source 1..23: mol_type = genomic DNA
ctggcacacagggcccaggctgg

SEQ ID NO: 5123 - DNA, 23 bp, Homo sapiens
  source 1..23: mol_type = genomic DNA
ctggcgggggcgcaagacccggg

SEQ ID NO: 5124 - DNA, 23 bp, Homo sapiens
  source 1..23: mol_type = genomic DNA
ctggcgggggcgcaggacccggg

SEQ ID NO: 5125 - DNA, 23 bp, Homo sapiens
  source 1..23: mol_type = genomic DNA
ctggcgggggcgcaggaccgggg

SEQ ID NO: 5126 - DNA, 23 bp, Homo sapiens
  source 1..23: mol_type = genomic DNA
ctggctgtcctagctgtcctagg

SEQ ID NO: 5127 - DNA, 23 bp, Homo sapiens
  source 1..23: mol_type = genomic DNA
ctgggaagcagcatccacacagg

SEQ ID NO: 5128 - DNA, 23 bp, Homo sapiens
  source 1..23: mol_type = genomic DNA
ctgggaagcagcatcctcacagg

SEQ ID NO: 5129 - DNA, 23 bp, Homo sapiens
  source 1..23: mol_type = genomic DNA
ctgggaagcagcatgcacacagg

SEQ ID NO: 5130 - DNA, 23 bp, Homo sapiens
  source 1..23: mol_type = genomic DNA
ctgggagctgaagtggtcggggg

SEQ ID NO: 5131 - DNA, 23 bp, Homo sapiens
  source 1..23: mol_type = genomic DNA
ctgggatgcagcatccacacagg

SEQ ID NO: 5132 - DNA, 23 bp, Homo sapiens
  source 1..23: mol_type = genomic DNA
ctgggcactgtcactgcctgggg

SEQ ID NO: 5133 - DNA, 23 bp, Homo sapiens
  source 1..23: mol_type = genomic DNA
ctgggcactgttgctgcctgggg

SEQ ID NO: 5134 - DNA, 23 bp, Homo sapiens
  source 1..23: mol_type = genomic DNA
ctgggcactgttgctggctgggg

SEQ ID NO: 5135 - DNA, 23 bp, Homo sapiens
  source 1..23: mol_type = genomic DNA
ctgggccagggtctcacacttgg

SEQ ID NO: 5136 - DNA, 23 bp, Homo sapiens
  source 1..23: mol_type = genomic DNA
ctgggccggtgagtgcgggtcgg

SEQ ID NO: 5137 - DNA, 23 bp, Homo sapiens
  source 1..23: mol_type = genomic DNA
ctgggcctctcccgggacaaggg

SEQ ID NO: 5138 - DNA, 23 bp, Homo sapiens
  source 1..23: mol_type = genomic DNA
ctgggcctctcccggggcaaggg

SEQ ID NO: 5139 - DNA, 23 bp, Homo sapiens
  source 1..23: mol_type = genomic DNA
ctgggcctctcccgggtcaaggg

SEQ ID NO: 5140 - DNA, 23 bp, Homo sapiens
  source 1..23: mol_type = genomic DNA
ctgggcgccatggatagagcagg

SEQ ID NO: 5141 - DNA, 23 bp, Homo sapiens
  source 1..23: mol_type = genomic DNA
ctgggcggattccgcagcctcgg

SEQ ID NO: 5142 - DNA, 23 bp, Homo sapiens
  source 1..23: mol_type = genomic DNA
ctgggcggggctcgggggactgg

SEQ ID NO: 5143 - DNA, 23 bp, Homo sapiens
  source 1..23: mol_type = genomic DNA
ctgggcgggtcccgcggcctcgg

SEQ ID NO: 5144 - DNA, 23 bp, Homo sapiens
  source 1..23: mol_type = genomic DNA
ctgggcgggttccgcagcctcgg

SEQ ID NO: 5145 - DNA, 23 bp, Homo sapiens
  source 1..23: mol_type = genomic DNA
ctgggctgaccgcggggccgggg

SEQ ID NO: 5146 - DNA, 23 bp, Homo sapiens
  source 1..23: mol_type = genomic DNA
ctgggctgaccgcgggggcgggg

SEQ ID NO: 5147 - DNA, 23 bp, Homo sapiens
  source 1..23: mol_type = genomic DNA
ctgggctgaccgcggggtcgggg

SEQ ID NO: 5148 - DNA, 23 bp, Homo sapiens
  source 1..23: mol_type = genomic DNA
ctgggctgaccgtggggtcgggg

SEQ ID NO: 5149 - DNA, 23 bp, Homo sapiens
  source 1..23: mol_type = genomic DNA
ctggggagatcacactgacctgg

SEQ ID NO: 5150 - DNA, 23 bp, Homo sapiens
  source 1..23: mol_type = genomic DNA
ctggggagctgaagtggtcgggg

SEQ ID NO: 5151 - DNA, 23 bp, Homo sapiens
  source 1..23: mol_type = genomic DNA
ctggggagctgaagtggtctggg

SEQ ID NO: 5152 - DNA, 23 bp, Homo sapiens
  source 1..23: mol_type = genomic DNA
ctggggcggggctcgcgggacgg

SEQ ID NO: 5153 - DNA, 23 bp, Homo sapiens
  source 1..23: mol_type = genomic DNA
ctggggcggggctcgggggacgg

SEQ ID NO: 5154 - DNA, 23 bp, Homo sapiens
  source 1..23: mol_type = genomic DNA
ctggggcggggtggggcagaggg

SEQ ID NO: 5155 - DNA, 23 bp, Homo sapiens
  source 1..23: mol_type = genomic DNA
ctggggctctcgccggtcgaggg

SEQ ID NO: 5156 - DNA, 23 bp, Homo sapiens
  source 1..23: mol_type = genomic DNA
ctggggctctctccggccgaggg

SEQ ID NO: 5157 - DNA, 23 bp, Homo sapiens
  source 1..23: mol_type = genomic DNA
ctggggctctctccggtcgaggg

SEQ ID NO: 5158 - DNA, 23 bp, Homo sapiens
  source 1..23: mol_type = genomic DNA
ctggggcttgaaacccccagtgg

SEQ ID NO: 5159 - DNA, 23 bp, Homo sapiens
  source 1..23: mol_type = genomic DNA
ctggggcttgaaactcccagtgg

SEQ ID NO: 5160 - DNA, 23 bp, Homo sapiens
  source 1..23: mol_type = genomic DNA
ctgggggtgggtggggcagaggg

SEQ ID NO: 5161 - DNA, 23 bp, Homo sapiens
  source 1..23: mol_type = genomic DNA
ctgggggtgggtggggcagtggg

SEQ ID NO: 5162 - DNA, 23 bp, Homo sapiens
  source 1..23: mol_type = genomic DNA
ctggggtaaggaggggaatgggg

SEQ ID NO: 5163 - DNA, 23 bp, Homo sapiens
  source 1..23: mol_type = genomic DNA
ctgggtaggcccataattgtggg

SEQ ID NO: 5164 - DNA, 23 bp, Homo sapiens
  source 1..23: mol_type = genomic DNA
ctgggtcagggctgaggcttggg

SEQ ID NO: 5165 - DNA, 23 bp, Homo sapiens
  source 1..23: mol_type = genomic DNA
ctgggtgggcccatgattgtggg

SEQ ID NO: 5166 - DNA, 23 bp, Homo sapiens
  source 1..23: mol_type = genomic DNA
ctgggttttcttgtcccactggg

SEQ ID NO: 5167 - DNA, 23 bp, Homo sapiens
  source 1..23: mol_type = genomic DNA
ctgggttttcttgttccactggg

SEQ ID NO: 5168 - DNA, 23 bp, Homo sapiens
  source 1..23: mol_type = genomic DNA
ctggtcacatgggtggtcctagg

SEQ ID NO: 5169 - DNA, 23 bp, Homo sapiens
  source 1..23: mol_type = genomic DNA
ctggtgagtgcggggtcggcagg

SEQ ID NO: 5170 - DNA, 23 bp, Homo sapiens
  source 1..23: mol_type = genomic DNA
ctggtgagtgcggggtcgggagg

SEQ ID NO: 5171 - DNA, 23 bp, Homo sapiens
  source 1..23: mol_type = genomic DNA
ctggttgtagtagccgcgcaggg

SEQ ID NO: 5172 - DNA, 23 bp, Homo sapiens
  source 1..23: mol_type = genomic DNA
ctggttgtagtagcggagcaggg

SEQ ID NO: 5173 - DNA, 23 bp, Homo sapiens
  source 1..23: mol_type = genomic DNA
ctggttgtagtagcggagcgcgg

SEQ ID NO: 5174 - DNA, 23 bp, Homo sapiens
  source 1..23: mol_type = genomic DNA
ctggttgtcctagctgtccttgg

SEQ ID NO: 5175 - DNA, 23 bp, Homo sapiens
  source 1..23: mol_type = genomic DNA
ctgtgagtgcgaggttgggaggg

SEQ ID NO: 5176 - DNA, 23 bp, Homo sapiens
  source 1..23: mol_type = genomic DNA
ctgtgagtgcggggttaggaggg

SEQ ID NO: 5177 - DNA, 23 bp, Homo sapiens
  source 1..23: mol_type = genomic DNA
ctgtgagtgcggggttgggaggg

SEQ ID NO: 5178 - DNA, 23 bp, Homo sapiens
  source 1..23: mol_type = genomic DNA
ctgtgccccttccccacaccagg

SEQ ID NO: 5179 - DNA, 23 bp, Homo sapiens
  source 1..23: mol_type = genomic DNA
ctgtgccccttccccaccccagg

SEQ ID NO: 5180 - DNA, 23 bp, Homo sapiens
  source 1..23: mol_type = genomic DNA
ctgtgctctcttccccatcccgg

SEQ ID NO: 5181 - DNA, 23 bp, Homo sapiens
  source 1..23: mol_type = genomic DNA
ctgtggagatcacactgacctgg

SEQ ID NO: 5182 - DNA, 23 bp, Homo sapiens
  source 1..23: mol_type = genomic DNA
ctgtggtcgctgccgtgatgtgg

SEQ ID NO: 5183 - DNA, 23 bp, Homo sapiens
  source 1..23: mol_type = genomic DNA
ctgtggtcgctgctgtgaggtgg

SEQ ID NO: 5184 - DNA, 23 bp, Homo sapiens
  source 1..23: mol_type = genomic DNA
ctgtggtcgctgctgtgatgtgg

SEQ ID NO: 5185 - DNA, 23 bp, Homo sapiens
  source 1..23: mol_type = genomic DNA
ctgtgtccaggctggcgtctggg

SEQ ID NO: 5186 - DNA, 23 bp, Homo sapiens
  source 1..23: mol_type = genomic DNA
ctgtgtccaggctggtgtctggg

SEQ ID NO: 5187 - DNA, 23 bp, Homo sapiens
  source 1..23: mol_type = genomic DNA
ctgtgtcccggcccggccgcggg

SEQ ID NO: 5188 - DNA, 23 bp, Homo sapiens
  source 1..23: mol_type = genomic DNA
ctgtgtcccttccccaccccagg

SEQ ID NO: 5189 - DNA, 23 bp, Homo sapiens
  source 1..23: mol_type = genomic DNA
ctgtgtcgggtccttcttccagg

SEQ ID NO: 5190 - DNA, 23 bp, Homo sapiens
  source 1..23: mol_type = genomic DNA
cttaattgagtcagagagcaggg

SEQ ID NO: 5191 - DNA, 23 bp, Homo sapiens
  source 1..23: mol_type = genomic DNA
cttaattgtctagagagaagagg

SEQ ID NO: 5192 - DNA, 23 bp, Homo sapiens
  source 1..23: mol_type = genomic DNA
cttaattgtgtcacagagcaggg

SEQ ID NO: 5193 - DNA, 23 bp, Homo sapiens
  source 1..23: mol_type = genomic DNA
cttaattgtgtcagagagcaggg

SEQ ID NO: 5194 - DNA, 23 bp, Homo sapiens
  source 1..23: mol_type = genomic DNA
cttaccccagctcagggtgaggg

SEQ ID NO: 5195 - DNA, 23 bp, Homo sapiens
  source 1..23: mol_type = genomic DNA
cttaccccatctcagggtgaggg

SEQ ID NO: 5196 - DNA, 23 bp, Homo sapiens
  source 1..23: mol_type = genomic DNA
cttactccatctcagggtgaggg

SEQ ID NO: 5197 - DNA, 23 bp, Homo sapiens
  source 1..23: mol_type = genomic DNA
cttactccatctcagggtgcagg

SEQ ID NO: 5198 - DNA, 23 bp, Homo sapiens
  source 1..23: mol_type = genomic DNA
cttaggagagcagttggtccagg

SEQ ID NO: 5199 - DNA, 23 bp, Homo sapiens
  source 1..23: mol_type = genomic DNA
cttaggagggcagttgcttcagg

SEQ ID NO: 5200 - DNA, 23 bp, Homo sapiens
  source 1..23: mol_type = genomic DNA
cttaggagggcagttggtccagg

SEQ ID NO: 5201 - DNA, 23 bp, Homo sapiens
  source 1..23: mol_type = genomic DNA
cttcaaacacattgagcatgagg

SEQ ID NO: 5202 - DNA, 23 bp, Homo sapiens
  source 1..23: mol_type = genomic DNA
cttcaaacacattgagcgtcagg

SEQ ID NO: 5203 - DNA, 23 bp, Homo sapiens
  source 1..23: mol_type = genomic DNA
cttcaaacacattgagcgtgagg

SEQ ID NO: 5204 - DNA, 23 bp, Homo sapiens
  source 1..23: mol_type = genomic DNA
cttcacaaaagagtaagtgctgg

SEQ ID NO: 5205 - DNA, 23 bp, Homo sapiens
  source 1..23: mol_type = genomic DNA
cttcacaacagagtaagtgctgg

SEQ ID NO: 5206 - DNA, 23 bp, Homo sapiens
  source 1..23: mol_type = genomic DNA
cttcacactcaatatgtgtgggg

SEQ ID NO: 5207 - DNA, 23 bp, Homo sapiens
  source 1..23: mol_type = genomic DNA
cttcacactcaatgtgtgtgggg

SEQ ID NO: 5208 - DNA, 23 bp, Homo sapiens
  source 1..23: mol_type = genomic DNA
cttcagacacattgagtgtgagg

SEQ ID NO: 5209 - DNA, 23 bp, Homo sapiens
  source 1..23: mol_type = genomic DNA
cttcagccaggtcagggctgagg

SEQ ID NO: 5210 - DNA, 23 bp, Homo sapiens
  source 1..23: mol_type = genomic DNA
cttcagccgggtcagggctgagg

SEQ ID NO: 5211 - DNA, 23 bp, Homo sapiens
  source 1..23: mol_type = genomic DNA
cttcagcctccactcaggtcagg

SEQ ID NO: 5212 - DNA, 23 bp, Homo sapiens
  source 1..23: mol_type = genomic DNA
cttcagctgggtcagggctgagg

SEQ ID NO: 5213 - DNA, 23 bp, Homo sapiens
  source 1..23: mol_type = genomic DNA
cttcatatctgtcacagtgaggg

SEQ ID NO: 5214 - DNA, 23 bp, Homo sapiens
  source 1..23: mol_type = genomic DNA
cttcatcaccgtgggctacgtgg

SEQ ID NO: 5215 - DNA, 23 bp, Homo sapiens
  source 1..23: mol_type = genomic DNA
cttcatcgcagtgggctacgtgg

SEQ ID NO: 5216 - DNA, 23 bp, Homo sapiens
  source 1..23: mol_type = genomic DNA
cttcatcgccgtgggctacgtgg

SEQ ID NO: 5217 - DNA, 23 bp, Homo sapiens
  source 1..23: mol_type = genomic DNA
cttcatctcagtgggctacgtgg

SEQ ID NO: 5218 - DNA, 23 bp, Homo sapiens
  source 1..23: mol_type = genomic DNA
cttcatggagtgggagcctgggg

SEQ ID NO: 5219 - DNA, 23 bp, Homo sapiens
  source 1..23: mol_type = genomic DNA
cttcatggtcagagacagcgtgg

SEQ ID NO: 5220 - DNA, 23 bp, Homo sapiens
  source 1..23: mol_type = genomic DNA
cttcattgcagtgggctacgtgg

SEQ ID NO: 5221 - DNA, 23 bp, Homo sapiens
  source 1..23: mol_type = genomic DNA
cttccagaagtggacagctgtgg

SEQ ID NO: 5222 - DNA, 23 bp, Homo sapiens
  source 1..23: mol_type = genomic DNA
cttccagaagtgggcagctgtgg

SEQ ID NO: 5223 - DNA, 23 bp, Homo sapiens
  source 1..23: mol_type = genomic DNA
cttccagaagtgggcggctgtgg

SEQ ID NO: 5224 - DNA, 23 bp, Homo sapiens
  source 1..23: mol_type = genomic DNA
cttccagaagtgggcgtctgtgg

SEQ ID NO: 5225 - DNA, 23 bp, Homo sapiens
  source 1..23: mol_type = genomic DNA
cttccagaagtgggtggctgtgg

SEQ ID NO: 5226 - DNA, 23 bp, Homo sapiens
  source 1..23: mol_type = genomic DNA
cttcccacagatagaaaaggagg

SEQ ID NO: 5227 - DNA, 23 bp, Homo sapiens
  source 1..23: mol_type = genomic DNA
cttcccacaggtggaaaaggagg

SEQ ID NO: 5228 - DNA, 23 bp, Homo sapiens
  source 1..23: mol_type = genomic DNA
cttcccacagttagaaaaggagg

SEQ ID NO: 5229 - DNA, 23 bp, Homo sapiens
  source 1..23: mol_type = genomic DNA
cttcctcccagtcccctcacagg

SEQ ID NO: 5230 - DNA, 23 bp, Homo sapiens
  source 1..23: mol_type = genomic DNA
cttcctcccagtgccctcacagg

SEQ ID NO: 5231 - DNA, 23 bp, Homo sapiens
  source 1..23: mol_type = genomic DNA
cttcctccgcgggtaccagcagg

SEQ ID NO: 5232 - DNA, 23 bp, Homo sapiens
  source 1..23: mol_type = genomic DNA
cttcctccgcgggtaccggcagg

SEQ ID NO: 5233 - DNA, 23 bp, Homo sapiens
  source 1..23: mol_type = genomic DNA
cttcctcctacacatcatagcgg

SEQ ID NO: 5234 - DNA, 23 bp, Homo sapiens
  source 1..23: mol_type = genomic DNA
cttcctggatactcacgacgcgg

SEQ ID NO: 5235 - DNA, 23 bp, Homo sapiens
  source 1..23: mol_type = genomic DNA
cttcggcctccactcaggtcagg

SEQ ID NO: 5236 - DNA, 23 bp, Homo sapiens
  source 1..23: mol_type = genomic DNA
cttctcacagatagaaaaggagg

SEQ ID NO: 5237 - DNA, 23 bp, Homo sapiens
  source 1..23: mol_type = genomic DNA
cttctctctaggacaattaaggg

SEQ ID NO: 5238 - DNA, 23 bp, Homo sapiens
  source 1..23: mol_type = genomic DNA
cttctctgaggtccaagacttgg

SEQ ID NO: 5239 - DNA, 23 bp, Homo sapiens
  source 1..23: mol_type = genomic DNA
cttctctggggtccaagactagg

SEQ ID NO: 5240 - DNA, 23 bp, Homo sapiens
  source 1..23: mol_type = genomic DNA
cttctcttgggtccaagactagg

SEQ ID NO: 5241 - DNA, 23 bp, Homo sapiens
  source 1..23: mol_type = genomic DNA
cttcttctcccaacctatgtcgg

SEQ ID NO: 5242 - DNA, 23 bp, Homo sapiens
  source 1..23: mol_type = genomic DNA
cttcttctcccaacctgcgacgg

SEQ ID NO: 5243 - DNA, 23 bp, Homo sapiens
  source 1..23: mol_type = genomic DNA
cttcttctcccaacctgcgtcgg

SEQ ID NO: 5244 - DNA, 23 bp, Homo sapiens
  source 1..23: mol_type = genomic DNA
cttcttctcccaacctgtgtcgg

SEQ ID NO: 5245 - DNA, 23 bp, Homo sapiens
  source 1..23: mol_type = genomic DNA
cttcttctcccaacttgtgtcgg

SEQ ID NO: 5246 - DNA, 23 bp, Homo sapiens
  source 1..23: mol_type = genomic DNA
cttcttcttccaacctgcgtcgg

SEQ ID NO: 5247 - DNA, 23 bp, Homo sapiens
  source 1..23: mol_type = genomic DNA
cttgaaaaggtgagattcttggg

SEQ ID NO: 5248 - DNA, 23 bp, Homo sapiens
  source 1..23: mol_type = genomic DNA
cttgctctatccacggcgcccgg

SEQ ID NO: 5249 - DNA, 23 bp, Homo sapiens
  source 1..23: mol_type = genomic DNA
cttgctggcctggttctctttgg

SEQ ID NO: 5250 - DNA, 23 bp, Homo sapiens
  source 1..23: mol_type = genomic DNA
cttgcttctccccgcagaggcgg

SEQ ID NO: 5251 - DNA, 23 bp, Homo sapiens
  source 1..23: mol_type = genomic DNA
cttggggtctagagtgggcgggg

SEQ ID NO: 5252 - DNA, 23 bp, Homo sapiens
  source 1..23: mol_type = genomic DNA
cttggggtctagagtgggtgggg

SEQ ID NO: 5253 - DNA, 23 bp, Homo sapiens
  source 1..23: mol_type = genomic DNA
cttggggtggatctcagacgggg

SEQ ID NO: 5254 - DNA, 23 bp, Homo sapiens
  source 1..23: mol_type = genomic DNA
cttgtaaaggtgagattctgggg

SEQ ID NO: 5255 - DNA, 23 bp, Homo sapiens
  source 1..23: mol_type = genomic DNA
cttgtaggcataatgtgaggagg

SEQ ID NO: 5256 - DNA, 23 bp, Homo sapiens
  source 1..23: mol_type = genomic DNA
cttgtgagggaccgagatgcagg

SEQ ID NO: 5257 - DNA, 23 bp, Homo sapiens
  source 1..23: mol_type = genomic DNA
cttgtgagggactgagatgcagg

SEQ ID NO: 5258 - DNA, 23 bp, Homo sapiens
  source 1..23: mol_type = genomic DNA
cttgtggagaccagaccagcagg

SEQ ID NO: 5259 - DNA, 23 bp, Homo sapiens
  source 1..23: mol_type = genomic DNA
cttgtggagaccaggccagcagg

SEQ ID NO: 5260 - DNA, 23 bp, Homo sapiens
  source 1..23: mol_type = genomic DNA
cttgtggagaccaggcctgcagg

SEQ ID NO: 5261 - DNA, 23 bp, Homo sapiens
  source 1..23: mol_type = genomic DNA
ctttaaacacattgagcgtgagg

SEQ ID NO: 5262 - DNA, 23 bp, Homo sapiens
  source 1..23: mol_type = genomic DNA
ctttacaaaagagtaagtgctgg

SEQ ID NO: 5263 - DNA, 23 bp, Homo sapiens
  source 1..23: mol_type = genomic DNA
ctttcctgttccagagaggtggg

SEQ ID NO: 5264 - DNA, 23 bp, Homo sapiens
  source 1..23: mol_type = genomic DNA
ctttcctgttgcagagaggtggg

SEQ ID NO: 5265 - DNA, 23 bp, Homo sapiens
  source 1..23: mol_type = genomic DNA
ctttgccgtcgtaggcgtactgg

SEQ ID NO: 5266 - DNA, 23 bp, Homo sapiens
  source 1..23: mol_type = genomic DNA
cttttgggtccaagacgaggagg

SEQ ID NO: 5267 - DNA, 23 bp, Homo sapiens
  source 1..23: mol_type = genomic DNA
cttttgggtccaagactaggagg

SEQ ID NO: 5268 - DNA, 23 bp, Homo sapiens
  source 1..23: mol_type = genomic DNA
cttttggttccaagacgaggagg

SEQ ID NO: 5269 - DNA, 23 bp, Homo sapiens
  source 1..23: mol_type = genomic DNA
ctttttttttgttctaccccagg

SEQ ID NO: 5270 - DNA, 23 bp, Homo sapiens
  source 1..23: mol_type = genomic DNA
gaaaagaaactgcggagttgggg

SEQ ID NO: 5271 - DNA, 23 bp, Homo sapiens
  source 1..23: mol_type = genomic DNA
gaaaattctagtccctgaagagg

SEQ ID NO: 5272 - DNA, 23 bp, Homo sapiens
  source 1..23: mol_type = genomic DNA
gaaaccggctaaaggcgcctggg

SEQ ID NO: 5273 - DNA, 23 bp, Homo sapiens
  source 1..23: mol_type = genomic DNA
gaaaccgggtaaacgcgcctggg

SEQ ID NO: 5274 - DNA, 23 bp, Homo sapiens
  source 1..23: mol_type = genomic DNA
gaaaccgggtaaaggcgactagg

SEQ ID NO: 5275 - DNA, 23 bp, Homo sapiens
  source 1..23: mol_type = genomic DNA
gaaaccgggtaaaggcgactggg

SEQ ID NO: 5276 - DNA, 23 bp, Homo sapiens
  source 1..23: mol_type = genomic DNA
gaaaccgggtaaaggcgcctggg

SEQ ID NO: 5277 - DNA, 23 bp, Homo sapiens
  source 1..23: mol_type = genomic DNA
gaaaccgggtaaaggtgactggg

SEQ ID NO: 5278 - DNA, 23 bp, Homo sapiens
  source 1..23: mol_type = genomic DNA
gaaaccgggttaaggcgcctggg

SEQ ID NO: 5279 - DNA, 23 bp, Homo sapiens
  source 1..23: mol_type = genomic DNA
gaaactcaggggagtgggagtgg

SEQ ID NO: 5280 - DNA, 23 bp, Homo sapiens
  source 1..23: mol_type = genomic DNA
gaaagcaggagcccttcagcagg

SEQ ID NO: 5281 - DNA, 23 bp, Homo sapiens
  source 1..23: mol_type = genomic DNA
gaaagttcgagtctctgagcggg

SEQ ID NO: 5282 - DNA, 23 bp, Homo sapiens
  source 1..23: mol_type = genomic DNA
gaaagttcgagtctctgagtggg

SEQ ID NO: 5283 - DNA, 23 bp, Homo sapiens
  source 1..23: mol_type = genomic DNA
gaacaaattcaggtcagtcatgg

SEQ ID NO: 5284 - DNA, 23 bp, Homo sapiens
  source 1..23: mol_type = genomic DNA
gaacaaattctggtgagtcatgg

SEQ ID NO: 5285 - DNA, 23 bp, Homo sapiens
  source 1..23: mol_type = genomic DNA
gaacaaattctggttagtcatgg

SEQ ID NO: 5286 - DNA, 23 bp, Homo sapiens
  source 1..23: mol_type = genomic DNA
gaacagctcaggtggagaagggg

SEQ ID NO: 5287 - DNA, 23 bp, Homo sapiens
  source 1..23: mol_type = genomic DNA
gaaccactcatcagtattcgagg

SEQ ID NO: 5288 - DNA, 23 bp, Homo sapiens
  source 1..23: mol_type = genomic DNA
gaaccagtcatcagtattcgagg

SEQ ID NO: 5289 - DNA, 23 bp, Homo sapiens
  source 1..23: mol_type = genomic DNA
gaaccatgacttttcctctcagg

SEQ ID NO: 5290 - DNA, 23 bp, Homo sapiens
  source 1..23: mol_type = genomic DNA
gaaccatgacttttcttctcagg

SEQ ID NO: 5291 - DNA, 23 bp, Homo sapiens
  source 1..23: mol_type = genomic DNA
gaaccctcctcctgctgctctgg

SEQ ID NO: 5292 - DNA, 23 bp, Homo sapiens
  source 1..23: mol_type = genomic DNA
gaaccgtcctcctgctgctctgg

SEQ ID NO: 5293 - DNA, 23 bp, Homo sapiens
  source 1..23: mol_type = genomic DNA
gaaccgtgacttttcctctcagg

SEQ ID NO: 5294 - DNA, 23 bp, Homo sapiens
  source 1..23: mol_type = genomic DNA
gaactacaagcgccaggcacagg

SEQ ID NO: 5295 - DNA, 23 bp, Homo sapiens
  source 1..23: mol_type = genomic DNA
gaactacgactgcagacccaggg

SEQ ID NO: 5296 - DNA, 23 bp, Homo sapiens
  source 1..23: mol_type = genomic DNA
gaactatgactgcagacccaggg

SEQ ID NO: 5297 - DNA, 23 bp, Homo sapiens
  source 1..23: mol_type = genomic DNA
gaagaaatacctcatggagtggg

SEQ ID NO: 5298 - DNA, 23 bp, Homo sapiens
  source 1..23: mol_type = genomic DNA
gaagaaatacttcatggagtggg

SEQ ID NO: 5299 - DNA, 23 bp, Homo sapiens
  source 1..23: mol_type = genomic DNA
gaagaagaagtgaaactcagggg

SEQ ID NO: 5300 - DNA, 23 bp, Homo sapiens
  source 1..23: mol_type = genomic DNA
gaagaagacgctgcagcgcgcgg

SEQ ID NO: 5301 - DNA, 23 bp, Homo sapiens
  source 1..23: mol_type = genomic DNA
gaagacagctctgggaaaagagg

SEQ ID NO: 5302 - DNA, 23 bp, Homo sapiens
  source 1..23: mol_type = genomic DNA
gaagacggctctgggaaaagagg

SEQ ID NO: 5303 - DNA, 23 bp, Homo sapiens
  source 1..23: mol_type = genomic DNA
gaagacggctctgggaaaggagg

SEQ ID NO: 5304 - DNA, 23 bp, Homo sapiens
  source 1..23: mol_type = genomic DNA
gaagagctcaggtagggaagggg

SEQ ID NO: 5305 - DNA, 23 bp, Homo sapiens
  source 1..23: mol_type = genomic DNA
gaagagctcaggtggagaagggg

SEQ ID NO: 5306 - DNA, 23 bp, Homo sapiens
  source 1..23: mol_type = genomic DNA
gaagagctcaggtggggaagggg

SEQ ID NO: 5307 - DNA, 23 bp, Homo sapiens
  source 1..23: mol_type = genomic DNA
gaagagctcaggtggggtgaagg

SEQ ID NO: 5308 - DNA, 23 bp, Homo sapiens
  source 1..23: mol_type = genomic DNA
gaagagggaacagcgacttctgg

SEQ ID NO: 5309 - DNA, 23 bp, Homo sapiens
  source 1..23: mol_type = genomic DNA
gaagagggtcatggtggacatgg

SEQ ID NO: 5310 - DNA, 23 bp, Homo sapiens
  source 1..23: mol_type = genomic DNA
gaagagttcaggtagggaagggg

SEQ ID NO: 5311 - DNA, 23 bp, Homo sapiens
  source 1..23: mol_type = genomic DNA
gaagatggccctgggaaaggagg

SEQ ID NO: 5312 - DNA, 23 bp, Homo sapiens
  source 1..23: mol_type = genomic DNA
gaagatggctctgggaaaagagg

SEQ ID NO: 5313 - DNA, 23 bp, Homo sapiens
  source 1..23: mol_type = genomic DNA
gaagatggctctgggaaaggagg

SEQ ID NO: 5314 - DNA, 23 bp, Homo sapiens
  source 1..23: mol_type = genomic DNA
gaagcaacgggcccgcctggcgg

SEQ ID NO: 5315 - DNA, 23 bp, Homo sapiens
  source 1..23: mol_type = genomic DNA
gaagcaaggggcccgcccggcgg

SEQ ID NO: 5316 - DNA, 23 bp, Homo sapiens
  source 1..23: mol_type = genomic DNA
gaagcaaggggcccgcctggcgg

SEQ ID NO: 5317 - DNA, 23 bp, Homo sapiens
  source 1..23: mol_type = genomic DNA
gaagcaaggggccctcctggcgg

SEQ ID NO: 5318 - DNA, 23 bp, Homo sapiens
  source 1..23: mol_type = genomic DNA
gaagcaccacccacaatcatggg

SEQ ID NO: 5319 - DNA, 23 bp, Homo sapiens
  source 1..23: mol_type = genomic DNA
gaagcaccacccacaattatggg

SEQ ID NO: 5320 - DNA, 23 bp, Homo sapiens
  source 1..23: mol_type = genomic DNA
gaagcaccatccacaatcatggg

SEQ ID NO: 5321 - DNA, 23 bp, Homo sapiens
  source 1..23: mol_type = genomic DNA
gaagcaccatccacaattatggg

SEQ ID NO: 5322 - DNA, 23 bp, Homo sapiens
  source 1..23: mol_type = genomic DNA
gaagcaccgtccacaatcatggg

SEQ ID NO: 5323 - DNA, 23 bp, Homo sapiens
  source 1..23: mol_type = genomic DNA
gaagcaccttccacaatcatggg

SEQ ID NO: 5324 - DNA, 23 bp, Homo sapiens
  source 1..23: mol_type = genomic DNA
gaagccaatcagcgtcgccgcgg

SEQ ID NO: 5325 - DNA, 23 bp, Homo sapiens
  source 1..23: mol_type = genomic DNA
gaagccaatcagcgtcgccgggg

SEQ ID NO: 5326 - DNA, 23 bp, Homo sapiens
  source 1..23: mol_type = genomic DNA
gaagccaatcagcgtcgccgtgg

SEQ ID NO: 5327 - DNA, 23 bp, Homo sapiens
  source 1..23: mol_type = genomic DNA
gaagccaatcagtgtcgccgggg

SEQ ID NO: 5328 - DNA, 23 bp, Homo sapiens
  source 1..23: mol_type = genomic DNA
gaagccaatcagtgtcgtcgcgg

SEQ ID NO: 5329 - DNA, 23 bp, Homo sapiens
  source 1..23: mol_type = genomic DNA
gaagccaatcagtgtcttcgcgg

SEQ ID NO: 5330 - DNA, 23 bp, Homo sapiens
  source 1..23: mol_type = genomic DNA
gaagccccgcttcatcgccgtgg

SEQ ID NO: 5331 - DNA, 23 bp, Homo sapiens
  source 1..23: mol_type = genomic DNA
gaagcccctcaccctgagatggg

SEQ ID NO: 5332 - DNA, 23 bp, Homo sapiens
  source 1..23: mol_type = genomic DNA
gaagcggggctccccgcggccgg

SEQ ID NO: 5333 - DNA, 23 bp, Homo sapiens
  source 1..23: mol_type = genomic DNA
gaagcggggctctccactgccgg

SEQ ID NO: 5334 - DNA, 23 bp, Homo sapiens
  source 1..23: mol_type = genomic DNA
gaagcggggctctccgcggccgg

SEQ ID NO: 5335 - DNA, 23 bp, Homo sapiens
  source 1..23: mol_type = genomic DNA
gaagcggggcttcccgcggccgg

SEQ ID NO: 5336 - DNA, 23 bp, Homo sapiens
  source 1..23: mol_type = genomic DNA
gaaggacacgctggagcgcgcgg

SEQ ID NO: 5337 - DNA, 23 bp, Homo sapiens
  source 1..23: mol_type = genomic DNA
gaaggacggatgtatcaccttgg

SEQ ID NO: 5338 - DNA, 23 bp, Homo sapiens
  source 1..23: mol_type = genomic DNA
gaaggagacgctgcagcgcacgg

SEQ ID NO: 5339 - DNA, 23 bp, Homo sapiens
  source 1..23: mol_type = genomic DNA
gaaggagacgctgcagcgcgcgg

SEQ ID NO: 5340 - DNA, 23 bp, Homo sapiens
  source 1..23: mol_type = genomic DNA
gaaggtccctgaggaccttcagg

SEQ ID NO: 5341 - DNA, 23 bp, Homo sapiens
  source 1..23: mol_type = genomic DNA
gaagtacaagcgccaggcacagg

SEQ ID NO: 5342 - DNA, 23 bp, Homo sapiens
  source 1..23: mol_type = genomic DNA
gaagtatgactacagacccaagg

SEQ ID NO: 5343 - DNA, 23 bp, Homo sapiens
  source 1..23: mol_type = genomic DNA
gaagtatgactacagacccaggg

SEQ ID NO: 5344 - DNA, 23 bp, Homo sapiens
  source 1..23: mol_type = genomic DNA
gaagtcccaggccccgggcgggg

SEQ ID NO: 5345 - DNA, 23 bp, Homo sapiens
  source 1..23: mol_type = genomic DNA
gaagtcccaggtcccggacgggg

SEQ ID NO: 5346 - DNA, 23 bp, Homo sapiens
  source 1..23: mol_type = genomic DNA
gaagtcccaggtcccgggcgggg

SEQ ID NO: 5347 - DNA, 23 bp, Homo sapiens
  source 1..23: mol_type = genomic DNA
gaagtcccatgtcccggacgggg

SEQ ID NO: 5348 - DNA, 23 bp, Homo sapiens
  source 1..23: mol_type = genomic DNA
gaagtccccagtcacccacccgg

SEQ ID NO: 5349 - DNA, 23 bp, Homo sapiens
  source 1..23: mol_type = genomic DNA
gaagtccctgaggaaatggaggg

SEQ ID NO: 5350 - DNA, 23 bp, Homo sapiens
  source 1..23: mol_type = genomic DNA
gaagtccttgaggaaatggaggg

SEQ ID NO: 5351 - DNA, 23 bp, Homo sapiens
  source 1..23: mol_type = genomic DNA
gaagtcgctgttccctcctcagg

SEQ ID NO: 5352 - DNA, 23 bp, Homo sapiens
  source 1..23: mol_type = genomic DNA
gaagtcgctgttccctcttcagg

SEQ ID NO: 5353 - DNA, 23 bp, Homo sapiens
  source 1..23: mol_type = genomic DNA
gaagtcgctgttcccttctcagg

SEQ ID NO: 5354 - DNA, 23 bp, Homo sapiens
  source 1..23: mol_type = genomic DNA
gaagtctctgaggaaatggaggg

SEQ ID NO: 5355 - DNA, 23 bp, Homo sapiens
  source 1..23: mol_type = genomic DNA
gaagtgaaactcaggggagtggg

SEQ ID NO: 5356 - DNA, 23 bp, Homo sapiens
  source 1..23: mol_type = genomic DNA
gaagtgaaactcgtgggagtggg

SEQ ID NO: 5357 - DNA, 23 bp, Homo sapiens
  source 1..23: mol_type = genomic DNA
gaagtggggctccccgcggccgg

SEQ ID NO: 5358 - DNA, 23 bp, Homo sapiens
  source 1..23: mol_type = genomic DNA
gaagtggggctctccgcggccgg

SEQ ID NO: 5359 - DNA, 23 bp, Homo sapiens
  source 1..23: mol_type = genomic DNA
gaagtggggctctccgcggctgg

SEQ ID NO: 5360 - DNA, 23 bp, Homo sapiens
  source 1..23: mol_type = genomic DNA
gaatatcgccctcccttgaatgg

SEQ ID NO: 5361 - DNA, 23 bp, Homo sapiens
  source 1..23: mol_type = genomic DNA
gaatatgtatggctgcgacgtgg

SEQ ID NO: 5362 - DNA, 23 bp, Homo sapiens
  source 1..23: mol_type = genomic DNA
gaatgacgtctctgaggaaatgg

SEQ ID NO: 5363 - DNA, 23 bp, Homo sapiens
  source 1..23: mol_type = genomic DNA
gaatgtcgccctcccttgaatgg

SEQ ID NO: 5364 - DNA, 23 bp, Homo sapiens
  source 1..23: mol_type = genomic DNA
gaatgtcgccctccgttgaatgg

SEQ ID NO: 5365 - DNA, 23 bp, Homo sapiens
  source 1..23: mol_type = genomic DNA
gacaagaggaattatggagtagg

SEQ ID NO: 5366 - DNA, 23 bp, Homo sapiens
  source 1..23: mol_type = genomic DNA
gacaagaggaattatggggtagg

SEQ ID NO: 5367 - DNA, 23 bp, Homo sapiens
  source 1..23: mol_type = genomic DNA
gacaagaggaattatggggtggg

SEQ ID NO: 5368 - DNA, 23 bp, Homo sapiens
  source 1..23: mol_type = genomic DNA
gacacagaactacaagcgccagg

SEQ ID NO: 5369 - DNA, 23 bp, Homo sapiens
  source 1..23: mol_type = genomic DNA
gacacagaagtacaagcgccagg

SEQ ID NO: 5370 - DNA, 23 bp, Homo sapiens
  source 1..23: mol_type = genomic DNA
gacacagatctgcaaggccaagg

SEQ ID NO: 5371 - DNA, 23 bp, Homo sapiens
  source 1..23: mol_type = genomic DNA
gacaccgccatgtcccggcccgg

SEQ ID NO: 5372 - DNA, 23 bp, Homo sapiens
  source 1..23: mol_type = genomic DNA
gacaccgccgtgtcccggcccgg

SEQ ID NO: 5373 - DNA, 23 bp, Homo sapiens
  source 1..23: mol_type = genomic DNA
gacacctggggtagggaaggggg

SEQ ID NO: 5374 - DNA, 23 bp, Homo sapiens
  source 1..23: mol_type = genomic DNA
gacacctggggtggggaaggcgg

SEQ ID NO: 5375 - DNA, 23 bp, Homo sapiens
  source 1..23: mol_type = genomic DNA
gacacctggggtggggaaggggg

SEQ ID NO: 5376 - DNA, 23 bp, Homo sapiens
  source 1..23: mol_type = genomic DNA
gacaggaggaattagggggtggg

SEQ ID NO: 5377 - DNA, 23 bp, Homo sapiens
  source 1..23: mol_type = genomic DNA
gacaggaggaattatggggtggg

SEQ ID NO: 5378 - DNA, 23 bp, Homo sapiens
  source 1..23: mol_type = genomic DNA
gacagggcacatttctagctggg

SEQ ID NO: 5379 - DNA, 23 bp, Homo sapiens
  source 1..23: mol_type = genomic DNA
gaccaacccgggggaatttttgg

SEQ ID NO: 5380 - DNA, 23 bp, Homo sapiens
  source 1..23: mol_type = genomic DNA
gaccaacccggggggatttttgg

SEQ ID NO: 5381 - DNA, 23 bp, Homo sapiens
  source 1..23: mol_type = genomic DNA
gaccaacctggggggatttttgg

SEQ ID NO: 5382 - DNA, 23 bp, Homo sapiens
  source 1..23: mol_type = genomic DNA
gaccaccaagcacaagtgggagg

SEQ ID NO: 5383 - DNA, 23 bp, Homo sapiens
  source 1..23: mol_type = genomic DNA
gaccagcatctcggcgtctgagg

SEQ ID NO: 5384 - DNA, 23 bp, Homo sapiens
  source 1..23: mol_type = genomic DNA
gaccagcatcttggcgtctgagg

SEQ ID NO: 5385 - DNA, 23 bp, Homo sapiens
  source 1..23: mol_type = genomic DNA
gaccagggcgggtgagtgcgggg

SEQ ID NO: 5386 - DNA, 23 bp, Homo sapiens
  source 1..23: mol_type = genomic DNA
gacccacccgaccctcctcccgg

SEQ ID NO: 5387 - DNA, 23 bp, Homo sapiens
  source 1..23: mol_type = genomic DNA
gacccacccggggggatttttgg

SEQ ID NO: 5388 - DNA, 23 bp, Homo sapiens
  source 1..23: mol_type = genomic DNA
gacccaggacaccgagcttgtgg

SEQ ID NO: 5389 - DNA, 23 bp, Homo sapiens
  source 1..23: mol_type = genomic DNA
gacccaggacacggagctcgtgg

SEQ ID NO: 5390 - DNA, 23 bp, Homo sapiens
  source 1..23: mol_type = genomic DNA
gacccaggacacggagcttgtgg

SEQ ID NO: 5391 - DNA, 23 bp, Homo sapiens
  source 1..23: mol_type = genomic DNA
gacccagttctcactcccattgg

SEQ ID NO: 5392 - DNA, 23 bp, Homo sapiens
  source 1..23: mol_type = genomic DNA
gaccccgagacccttgacccggg

SEQ ID NO: 5393 - DNA, 23 bp, Homo sapiens
  source 1..23: mol_type = genomic DNA
gaccccgagacccttgccccggg

SEQ ID NO: 5394 - DNA, 23 bp, Homo sapiens
  source 1..23: mol_type = genomic DNA
gaccccgaggatggccgtcatgg

SEQ ID NO: 5395 - DNA, 23 bp, Homo sapiens
  source 1..23: mol_type = genomic DNA
gaccccgcactcaccagcccagg

SEQ ID NO: 5396 - DNA, 23 bp, Homo sapiens
  source 1..23: mol_type = genomic DNA
gaccccgcactcacccgcccagg

SEQ ID NO: 5397 - DNA, 23 bp, Homo sapiens
  source 1..23: mol_type = genomic DNA
gaccccgcactcacccgccctgg

SEQ ID NO: 5398 - DNA, 23 bp, Homo sapiens
  source 1..23: mol_type = genomic DNA
gaccccgcactcaccggcccagg

SEQ ID NO: 5399 - DNA, 23 bp, Homo sapiens
  source 1..23: mol_type = genomic DNA
gaccccgcactcacctgcccagg

SEQ ID NO: 5400 - DNA, 23 bp, Homo sapiens
  source 1..23: mol_type = genomic DNA
gacccctcatcccccacggacgg

SEQ ID NO: 5401 - DNA, 23 bp, Homo sapiens
  source 1..23: mol_type = genomic DNA
gacccctcatcccctacggacgg

SEQ ID NO: 5402 - DNA, 23 bp, Homo sapiens
  source 1..23: mol_type = genomic DNA
gacccctgatcactatcctaggg

SEQ ID NO: 5403 - DNA, 23 bp, Homo sapiens
  source 1..23: mol_type = genomic DNA
gacccctgatcagtattccaggg

SEQ ID NO: 5404 - DNA, 23 bp, Homo sapiens
  source 1..23: mol_type = genomic DNA
gacccctgatcagtattctaggg

SEQ ID NO: 5405 - DNA, 23 bp, Homo sapiens
  source 1..23: mol_type = genomic DNA
gacccgcatctcggcctctgggg

SEQ ID NO: 5406 - DNA, 23 bp, Homo sapiens
  source 1..23: mol_type = genomic DNA
gacccgcatctcggcgtctgagg

SEQ ID NO: 5407 - DNA, 23 bp, Homo sapiens
  source 1..23: mol_type = genomic DNA
gacccgcatctcggcgtctgggg

SEQ ID NO: 5408 - DNA, 23 bp, Homo sapiens
  source 1..23: mol_type = genomic DNA
gacccgcatctcggtgtctgagg

SEQ ID NO: 5409 - DNA, 23 bp, Homo sapiens
  source 1..23: mol_type = genomic DNA
gacccgccagaccctcctcccgg

SEQ ID NO: 5410 - DNA, 23 bp, Homo sapiens
  source 1..23: mol_type = genomic DNA
gacccgcccaaaccctcgaccgg

SEQ ID NO: 5411 - DNA, 23 bp, Homo sapiens
  source 1..23: mol_type = genomic DNA
gacccgcccagaccctcgaccgg

SEQ ID NO: 5412 - DNA, 23 bp, Homo sapiens
  source 1..23: mol_type = genomic DNA
gacccgcccgaccctcctccagg

SEQ ID NO: 5413 - DNA, 23 bp, Homo sapiens
  source 1..23: mol_type = genomic DNA
gacccgcccgaccctcctcccgg

SEQ ID NO: 5414 - DNA, 23 bp, Homo sapiens
  source 1..23: mol_type = genomic DNA
gaccctacataggttggcagagg

SEQ ID NO: 5415 - DNA, 23 bp, Homo sapiens
  source 1..23: mol_type = genomic DNA
gaccctacataggttgggagagg

SEQ ID NO: 5416 - DNA, 23 bp, Homo sapiens
  source 1..23: mol_type = genomic DNA
gaccctacgtaggttgggagagg

SEQ ID NO: 5417 - DNA, 23 bp, Homo sapiens
  source 1..23: mol_type = genomic DNA
gaccctgagagccacgcctgggg

SEQ ID NO: 5418 - DNA, 23 bp, Homo sapiens
  source 1..23: mol_type = genomic DNA
gaccctgagagccccgcccgggg

SEQ ID NO: 5419 - DNA, 23 bp, Homo sapiens
  source 1..23: mol_type = genomic DNA
gaccctgctaaaggtcagagagg

SEQ ID NO: 5420 - DNA, 23 bp, Homo sapiens
  source 1..23: mol_type = genomic DNA
gaccgaccctcctcccggcgcgg

SEQ ID NO: 5421 - DNA, 23 bp, Homo sapiens
  source 1..23: mol_type = genomic DNA
gaccgcctcccacttgcgcttgg

SEQ ID NO: 5422 - DNA, 23 bp, Homo sapiens
  source 1..23: mol_type = genomic DNA
gaccgggctgaccacgggggcgg

SEQ ID NO: 5423 - DNA, 23 bp, Homo sapiens
  source 1..23: mol_type = genomic DNA
gaccgggctgaccgcggggtcgg

SEQ ID NO: 5424 - DNA, 23 bp, Homo sapiens
  source 1..23: mol_type = genomic DNA
gacctctcatcccccacggacgg

SEQ ID NO: 5425 - DNA, 23 bp, Homo sapiens
  source 1..23: mol_type = genomic DNA
gacctgaccgaccctcctcccgg

SEQ ID NO: 5426 - DNA, 23 bp, Homo sapiens
  source 1..23: mol_type = genomic DNA
gacctgcccgaccctcctcccgg

SEQ ID NO: 5427 - DNA, 23 bp, Homo sapiens
  source 1..23: mol_type = genomic DNA
gacctgcccgaccctcgtcccgg

SEQ ID NO: 5428 - DNA, 23 bp, Homo sapiens
  source 1..23: mol_type = genomic DNA
gacctggaccggtgagtgcgggg

SEQ ID NO: 5429 - DNA, 23 bp, Homo sapiens
  source 1..23: mol_type = genomic DNA
gacctggcagcgggatggcgagg

SEQ ID NO: 5430 - DNA, 23 bp, Homo sapiens
  source 1..23: mol_type = genomic DNA
gacctggcagcgggatggggagg

SEQ ID NO: 5431 - DNA, 23 bp, Homo sapiens
  source 1..23: mol_type = genomic DNA
gacctggcagtgggatggggagg

SEQ ID NO: 5432 - DNA, 23 bp, Homo sapiens
  source 1..23: mol_type = genomic DNA
gacctgggcaggtgagtgcgggg

SEQ ID NO: 5433 - DNA, 23 bp, Homo sapiens
  source 1..23: mol_type = genomic DNA
gacctgggccggtgagtgcgggg

SEQ ID NO: 5434 - DNA, 23 bp, Homo sapiens
  source 1..23: mol_type = genomic DNA
gacctgggcctgtgagtgcgagg

SEQ ID NO: 5435 - DNA, 23 bp, Homo sapiens
  source 1..23: mol_type = genomic DNA
gacctgggcctgtgagtgcgggg

SEQ ID NO: 5436 - DNA, 23 bp, Homo sapiens
  source 1..23: mol_type = genomic DNA
gacctgggcgggtgagtgcgggg

SEQ ID NO: 5437 - DNA, 23 bp, Homo sapiens
  source 1..23: mol_type = genomic DNA
gacctgggctggtgagtgcgggg

SEQ ID NO: 5438 - DNA, 23 bp, Homo sapiens
  source 1..23: mol_type = genomic DNA
gacgatgtacggctgcgacgtgg

SEQ ID NO: 5439 - DNA, 23 bp, Homo sapiens
  source 1..23: mol_type = genomic DNA
gacgatgtatggctgcgacctgg

SEQ ID NO: 5440 - DNA, 23 bp, Homo sapiens
  source 1..23: mol_type = genomic DNA
gacgatgtatggctgcgacgtgg

SEQ ID NO: 5441 - DNA, 23 bp, Homo sapiens
  source 1..23: mol_type = genomic DNA
gacgccgaggatggccgtcatgg

SEQ ID NO: 5442 - DNA, 23 bp, Homo sapiens
  source 1..23: mol_type = genomic DNA
gacggccatcctcggcgtctggg

SEQ ID NO: 5443 - DNA, 23 bp, Homo sapiens
  source 1..23: mol_type = genomic DNA
gacggccatcctcggggtctggg

SEQ ID NO: 5444 - DNA, 23 bp, Homo sapiens
  source 1..23: mol_type = genomic DNA
gacgggctgaccacgggggcggg

SEQ ID NO: 5445 - DNA, 23 bp, Homo sapiens
  source 1..23: mol_type = genomic DNA
gacggggctctcagggtctcagg

SEQ ID NO: 5446 - DNA, 23 bp, Homo sapiens
  source 1..23: mol_type = genomic DNA
gacggggctgaccacgggggcgg

SEQ ID NO: 5447 - DNA, 23 bp, Homo sapiens
  source 1..23: mol_type = genomic DNA
gacggggctgaccgcggggccgg

SEQ ID NO: 5448 - DNA, 23 bp, Homo sapiens
  source 1..23: mol_type = genomic DNA
gacggggctgaccgcgggggcgg

SEQ ID NO: 5449 - DNA, 23 bp, Homo sapiens
  source 1..23: mol_type = genomic DNA
gacggtgagtgaccccggcccgg

SEQ ID NO: 5450 - DNA, 23 bp, Homo sapiens
  source 1..23: mol_type = genomic DNA
gacggtgctgaccgcggggccgg

SEQ ID NO: 5451 - DNA, 23 bp, Homo sapiens
  source 1..23: mol_type = genomic DNA
gacggtgtgagaacctggcccgg

SEQ ID NO: 5452 - DNA, 23 bp, Homo sapiens
  source 1..23: mol_type = genomic DNA
gacgtctctgaggaaatggaggg

SEQ ID NO: 5453 - DNA, 23 bp, Homo sapiens
  source 1..23: mol_type = genomic DNA
gacgtctctgaggaaatgtaggg

SEQ ID NO: 5454 - DNA, 23 bp, Homo sapiens
  source 1..23: mol_type = genomic DNA
gacgtgggacaggaggaattagg

SEQ ID NO: 5455 - DNA, 23 bp, Homo sapiens
  source 1..23: mol_type = genomic DNA
gactcacgaatgctggaatcagg

SEQ ID NO: 5456 - DNA, 23 bp, Homo sapiens
  source 1..23: mol_type = genomic DNA
gactcatgaatgctgaaatcagg

SEQ ID NO: 5457 - DNA, 23 bp, Homo sapiens
  source 1..23: mol_type = genomic DNA
gactcatgaatgctggaatcagg

SEQ ID NO: 5458 - DNA, 23 bp, Homo sapiens
  source 1..23: mol_type = genomic DNA
gactccccatcccccacggacgg

SEQ ID NO: 5459 - DNA, 23 bp, Homo sapiens
  source 1..23: mol_type = genomic DNA
gactccccatcccccacgtacgg

SEQ ID NO: 5460 - DNA, 23 bp, Homo sapiens
  source 1..23: mol_type = genomic DNA
gactccgagacccttgtcccggg

SEQ ID NO: 5461 - DNA, 23 bp, Homo sapiens
  source 1..23: mol_type = genomic DNA
gactctgagagccacgcctgggg

SEQ ID NO: 5462 - DNA, 23 bp, Homo sapiens
  source 1..23: mol_type = genomic DNA
gactgggctgaccgcggggccgg

SEQ ID NO: 5463 - DNA, 23 bp, Homo sapiens
  source 1..23: mol_type = genomic DNA
gactgggctgaccgcgggggcgg

SEQ ID NO: 5464 - DNA, 23 bp, Homo sapiens
  source 1..23: mol_type = genomic DNA
gactgggctgaccgcggggtcgg

SEQ ID NO: 5465 - DNA, 23 bp, Homo sapiens
  source 1..23: mol_type = genomic DNA
gactgggctgaccgtggggtcgg

SEQ ID NO: 5466 - DNA, 23 bp, Homo sapiens
  source 1..23: mol_type = genomic DNA
gacttgtgactgctgggatcagg

SEQ ID NO: 5467 - DNA, 23 bp, Homo sapiens
  source 1..23: mol_type = genomic DNA
gacttgtgactgctggtatcagg

SEQ ID NO: 5468 - DNA, 23 bp, Homo sapiens
  source 1..23: mol_type = genomic DNA
gagaaaagaaactgcggagttgg

SEQ ID NO: 5469 - DNA, 23 bp, Homo sapiens
  source 1..23: mol_type = genomic DNA
gagaacaaggcctgagagaaagg

SEQ ID NO: 5470 - DNA, 23 bp, Homo sapiens
  source 1..23: mol_type = genomic DNA
gagaaccccgcccgggacctggg

SEQ ID NO: 5471 - DNA, 23 bp, Homo sapiens
  source 1..23: mol_type = genomic DNA
gagaacctgcggaacctgcgcgg

SEQ ID NO: 5472 - DNA, 23 bp, Homo sapiens
  source 1..23: mol_type = genomic DNA
gagaacctggggaccctgcgcgg

SEQ ID NO: 5473 - DNA, 23 bp, Homo sapiens
  source 1..23: mol_type = genomic DNA
gagaacggacaggacacctgggg

SEQ ID NO: 5474 - DNA, 23 bp, Homo sapiens
  source 1..23: mol_type = genomic DNA
gagaagccaatcagcgtcgccgg

SEQ ID NO: 5475 - DNA, 23 bp, Homo sapiens
  source 1..23: mol_type = genomic DNA
gagaagccaatcagtgtcgccgg

SEQ ID NO: 5476 - DNA, 23 bp, Homo sapiens
  source 1..23: mol_type = genomic DNA
gagaagggaacagcgacttctgg

SEQ ID NO: 5477 - DNA, 23 bp, Homo sapiens
  source 1..23: mol_type = genomic DNA
gagaatggacaggacacctgggg

SEQ ID NO: 5478 - DNA, 23 bp, Homo sapiens
  source 1..23: mol_type = genomic DNA
gagaatggacgggacacctgggg

SEQ ID NO: 5479 - DNA, 23 bp, Homo sapiens
  source 1..23: mol_type = genomic DNA
gagaatgggcaggacacctgggg

SEQ ID NO: 5480 - DNA, 23 bp, Homo sapiens
  source 1..23: mol_type = genomic DNA
gagacagaaccttccagaagtgg

SEQ ID NO: 5481 - DNA, 23 bp, Homo sapiens
  source 1..23: mol_type = genomic DNA
gagaccaggccagcaggagatgg

SEQ ID NO: 5482 - DNA, 23 bp, Homo sapiens
  source 1..23: mol_type = genomic DNA
gagaccaggcctgcaggggatgg

SEQ ID NO: 5483 - DNA, 23 bp, Homo sapiens
  source 1..23: mol_type = genomic DNA
gagacccagagagccccgcccgg

SEQ ID NO: 5484 - DNA, 23 bp, Homo sapiens
  source 1..23: mol_type = genomic DNA
gagaccctgagaaccccgcccgg

SEQ ID NO: 5485 - DNA, 23 bp, Homo sapiens
  source 1..23: mol_type = genomic DNA
gagaccctgagagccacgcctgg

SEQ ID NO: 5486 - DNA, 23 bp, Homo sapiens
  source 1..23: mol_type = genomic DNA
gagaccctgagagccccgcccgg

SEQ ID NO: 5487 - DNA, 23 bp, Homo sapiens
  source 1..23: mol_type = genomic DNA
gagaccctgagagccccgtccgg

SEQ ID NO: 5488 - DNA, 23 bp, Homo sapiens
  source 1..23: mol_type = genomic DNA
gagacctggaccggtgagtgcgg

SEQ ID NO: 5489 - DNA, 23 bp, Homo sapiens
  source 1..23: mol_type = genomic DNA
gagacctgggccggtgagtgcgg

SEQ ID NO: 5490 - DNA, 23 bp, Homo sapiens
  source 1..23: mol_type = genomic DNA
gagacctgggcctgtgagtgcgg

SEQ ID NO: 5491 - DNA, 23 bp, Homo sapiens
  source 1..23: mol_type = genomic DNA
gagacctgggctggtgagtgcgg

SEQ ID NO: 5492 - DNA, 23 bp, Homo sapiens
  source 1..23: mol_type = genomic DNA
gagactctgagagccacgcctgg

SEQ ID NO: 5493 - DNA, 23 bp, Homo sapiens
  source 1..23: mol_type = genomic DNA
gagagacacatcagagccctggg

SEQ ID NO: 5494 - DNA, 23 bp, Homo sapiens
  source 1..23: mol_type = genomic DNA
gagagacatatcagagccctggg

SEQ ID NO: 5495 - DNA, 23 bp, Homo sapiens
  source 1..23: mol_type = genomic DNA
gagagactcatcagagccctggg

SEQ ID NO: 5496 - DNA, 23 bp, Homo sapiens
  source 1..23: mol_type = genomic DNA
gagagaggggaccgcaggcgggg

SEQ ID NO: 5497 - DNA, 23 bp, Homo sapiens
  source 1..23: mol_type = genomic DNA
gagagccacgcctggggccctgg

SEQ ID NO: 5498 - DNA, 23 bp, Homo sapiens
  source 1..23: mol_type = genomic DNA
gagagccccgcccgggacctggg

SEQ ID NO: 5499 - DNA, 23 bp, Homo sapiens
  source 1..23: mol_type = genomic DNA
gagagccccgcccggggcctggg

SEQ ID NO: 5500 - DNA, 23 bp, Homo sapiens
  source 1..23: mol_type = genomic DNA
gagagccccgtccgggacatggg

SEQ ID NO: 5501 - DNA, 23 bp, Homo sapiens
  source 1..23: mol_type = genomic DNA
gagagccccgtccgggacctggg

SEQ ID NO: 5502 - DNA, 23 bp, Homo sapiens
  source 1..23: mol_type = genomic DNA
gagagcctgcggaacctgcgcgg

SEQ ID NO: 5503 - DNA, 23 bp, Homo sapiens
  source 1..23: mol_type = genomic DNA
gagagcctggggacgaggagtgg

SEQ ID NO: 5504 - DNA, 23 bp, Homo sapiens
  source 1..23: mol_type = genomic DNA
gagaggagccgcgggcgccgtgg

SEQ ID NO: 5505 - DNA, 23 bp, Homo sapiens
  source 1..23: mol_type = genomic DNA
gagagggagaaaagaaactgcgg

SEQ ID NO: 5506 - DNA, 23 bp, Homo sapiens
  source 1..23: mol_type = genomic DNA
gagataccagaaaggagccaggg

SEQ ID NO: 5507 - DNA, 23 bp, Homo sapiens
  source 1..23: mol_type = genomic DNA
gagataccagaaaggagtcaggg

SEQ ID NO: 5508 - DNA, 23 bp, Homo sapiens
  source 1..23: mol_type = genomic DNA
gagatagaaccttccagaagtgg

SEQ ID NO: 5509 - DNA, 23 bp, Homo sapiens
  source 1..23: mol_type = genomic DNA
gagatccaccccgaagccgcggg

SEQ ID NO: 5510 - DNA, 23 bp, Homo sapiens
  source 1..23: mol_type = genomic DNA
gagatccgcccccgaggccgcgg

SEQ ID NO: 5511 - DNA, 23 bp, Homo sapiens
  source 1..23: mol_type = genomic DNA
gagatccgccccgaagccgcggg

SEQ ID NO: 5512 - DNA, 23 bp, Homo sapiens
  source 1..23: mol_type = genomic DNA
gagatggaaccttccagaagtgg

SEQ ID NO: 5513 - DNA, 23 bp, Homo sapiens
  source 1..23: mol_type = genomic DNA
gagattctggggagctgaagtgg

SEQ ID NO: 5514 - DNA, 23 bp, Homo sapiens
  source 1..23: mol_type = genomic DNA
gagattcttggggtctagagtgg

SEQ ID NO: 5515 - DNA, 23 bp, Homo sapiens
  source 1..23: mol_type = genomic DNA
gagatttcttgtctcactgaggg

SEQ ID NO: 5516 - DNA, 23 bp, Homo sapiens
  source 1..23: mol_type = genomic DNA
gagcaaggggaccgcaggcgggg

SEQ ID NO: 5517 - DNA, 23 bp, Homo sapiens
  source 1..23: mol_type = genomic DNA
gagcagcaggaggacggttcggg

SEQ ID NO: 5518 - DNA, 23 bp, Homo sapiens
  source 1..23: mol_type = genomic DNA
gagcagcaggaggagggctcggg

SEQ ID NO: 5519 - DNA, 23 bp, Homo sapiens
  source 1..23: mol_type = genomic DNA
gagcagcaggaggagggcttggg

SEQ ID NO: 5520 - DNA, 23 bp, Homo sapiens
  source 1..23: mol_type = genomic DNA
gagcagcaggaggagggttcggg

SEQ ID NO: 5521 - DNA, 23 bp, Homo sapiens
  source 1..23: mol_type = genomic DNA
gagcagcaggatgagggttcggg

SEQ ID NO: 5522 - DNA, 23 bp, Homo sapiens
  source 1..23: mol_type = genomic DNA
gagcatgtacggctgcgacgtgg

SEQ ID NO: 5523 - DNA, 23 bp, Homo sapiens
  source 1..23: mol_type = genomic DNA
gagccagaagatggagccgcggg

SEQ ID NO: 5524 - DNA, 23 bp, Homo sapiens
  source 1..23: mol_type = genomic DNA
gagccagaggatggagccgcggg

SEQ ID NO: 5525 - DNA, 23 bp, Homo sapiens
  source 1..23: mol_type = genomic DNA
gagccccacttcatcgcagtggg

SEQ ID NO: 5526 - DNA, 23 bp, Homo sapiens
  source 1..23: mol_type = genomic DNA
gagccccaggcgcgtttacccgg

SEQ ID NO: 5527 - DNA, 23 bp, Homo sapiens
  source 1..23: mol_type = genomic DNA
gagccccagtcacctttacccgg

SEQ ID NO: 5528 - DNA, 23 bp, Homo sapiens
  source 1..23: mol_type = genomic DNA
gagccccagtcgcctttacccgg

SEQ ID NO: 5529 - DNA, 23 bp, Homo sapiens
  source 1..23: mol_type = genomic DNA
gagccccgcttcatcaccgtggg

SEQ ID NO: 5530 - DNA, 23 bp, Homo sapiens
  source 1..23: mol_type = genomic DNA
gagccccgcttcatcgcagtggg

SEQ ID NO: 5531 - DNA, 23 bp, Homo sapiens
  source 1..23: mol_type = genomic DNA
gagccccgcttcatcgccgtggg

SEQ ID NO: 5532 - DNA, 23 bp, Homo sapiens
  source 1..23: mol_type = genomic DNA
gagccccgcttcatctcagtggg

SEQ ID NO: 5533 - DNA, 23 bp, Homo sapiens
  source 1..23: mol_type = genomic DNA
gagccccgcttcattgcagtggg

SEQ ID NO: 5534 - DNA, 23 bp, Homo sapiens
  source 1..23: mol_type = genomic DNA
gagcccctcaccctgagatgggg

SEQ ID NO: 5535 - DNA, 23 bp, Homo sapiens
  source 1..23: mol_type = genomic DNA
gagcccctcaccctgagctgggg

SEQ ID NO: 5536 - DNA, 23 bp, Homo sapiens
  source 1..23: mol_type = genomic DNA
gagccctagtcgcctttacccgg

SEQ ID NO: 5537 - DNA, 23 bp, Homo sapiens
  source 1..23: mol_type = genomic DNA
gagccggaggatggagccgcggg

SEQ ID NO: 5538 - DNA, 23 bp, Homo sapiens
  source 1..23: mol_type = genomic DNA
gagccgtgggtggagcaggaggg

SEQ ID NO: 5539 - DNA, 23 bp, Homo sapiens
  source 1..23: mol_type = genomic DNA
gagcctctctgacctttagcagg

SEQ ID NO: 5540 - DNA, 23 bp, Homo sapiens
  source 1..23: mol_type = genomic DNA
gagccttccccatctcctatagg

SEQ ID NO: 5541 - DNA, 23 bp, Homo sapiens
  source 1..23: mol_type = genomic DNA
gagccttgtctgcattggggagg

SEQ ID NO: 5542 - DNA, 23 bp, Homo sapiens
  source 1..23: mol_type = genomic DNA
gagcgaggggaccgcaggcgggg

SEQ ID NO: 5543 - DNA, 23 bp, Homo sapiens
  source 1..23: mol_type = genomic DNA
gagctaccagaaaggagccaggg

SEQ ID NO: 5544 - DNA, 23 bp, Homo sapiens
  source 1..23: mol_type = genomic DNA
gagctgaagtggtcgggggtggg

SEQ ID NO: 5545 - DNA, 23 bp, Homo sapiens
  source 1..23: mol_type = genomic DNA
gagctgaagtggtctggggtggg

SEQ ID NO: 5546 - DNA, 23 bp, Homo sapiens
  source 1..23: mol_type = genomic DNA
gagctgggtgatctgagccgcgg

SEQ ID NO: 5547 - DNA, 23 bp, Homo sapiens
  source 1..23: mol_type = genomic DNA
gagctgtggtcgctgctgtgagg

SEQ ID NO: 5548 - DNA, 23 bp, Homo sapiens
  source 1..23: mol_type = genomic DNA
gaggaaaagtcacgggcccaagg

SEQ ID NO: 5549 - DNA, 23 bp, Homo sapiens
  source 1..23: mol_type = genomic DNA
gaggaaaagtcacggtcccaagg

SEQ ID NO: 5550 - DNA, 23 bp, Homo sapiens
  source 1..23: mol_type = genomic DNA
gaggaaaatgggatcagcactgg

SEQ ID NO: 5551 - DNA, 23 bp, Homo sapiens
  source 1..23: mol_type = genomic DNA
gaggaaaatgggatcagcgctgg

SEQ ID NO: 5552 - DNA, 23 bp, Homo sapiens
  source 1..23: mol_type = genomic DNA
gaggaaagtcacggttcccaagg

SEQ ID NO: 5553 - DNA, 23 bp, Homo sapiens
  source 1..23: mol_type = genomic DNA
gaggacagacctcaggagggcgg

SEQ ID NO: 5554 - DNA, 23 bp, Homo sapiens
  source 1..23: mol_type = genomic DNA
gaggagactctgagtccgggtgg

SEQ ID NO: 5555 - DNA, 23 bp, Homo sapiens
  source 1..23: mol_type = genomic DNA
gaggagattctgagtccgggtgg

SEQ ID NO: 5556 - DNA, 23 bp, Homo sapiens
  source 1..23: mol_type = genomic DNA
gaggagattttgagtccgggtgg

SEQ ID NO: 5557 - DNA, 23 bp, Homo sapiens
  source 1..23: mol_type = genomic DNA
gaggagccgcgccgggaggaggg

SEQ ID NO: 5558 - DNA, 23 bp, Homo sapiens
  source 1..23: mol_type = genomic DNA
gaggaggaagagctcaggtgggg

SEQ ID NO: 5559 - DNA, 23 bp, Homo sapiens
  source 1..23: mol_type = genomic DNA
gaggagggaacagcgacttctgg

SEQ ID NO: 5560 - DNA, 23 bp, Homo sapiens
  source 1..23: mol_type = genomic DNA
gaggatgtacggctgcgacctgg

SEQ ID NO: 5561 - DNA, 23 bp, Homo sapiens
  source 1..23: mol_type = genomic DNA
gaggatgtacggctgcgacgtgg

SEQ ID NO: 5562 - DNA, 23 bp, Homo sapiens
  source 1..23: mol_type = genomic DNA
gaggatgtatggctgcgacctgg

SEQ ID NO: 5563 - DNA, 23 bp, Homo sapiens
  source 1..23: mol_type = genomic DNA
gaggatgtatggctgcgacgtgg

SEQ ID NO: 5564 - DNA, 23 bp, Homo sapiens
  source 1..23: mol_type = genomic DNA
gaggatgtctggctgcgacctgg

SEQ ID NO: 5565 - DNA, 23 bp, Homo sapiens
  source 1..23: mol_type = genomic DNA
gaggatgtctggctgcgacgtgg

SEQ ID NO: 5566 - DNA, 23 bp, Homo sapiens
  source 1..23: mol_type = genomic DNA
gaggatgtgtggctgcgacgtgg

SEQ ID NO: 5567 - DNA, 23 bp, Homo sapiens
  source 1..23: mol_type = genomic DNA
gaggatgtttggctgcgacctgg

SEQ ID NO: 5568 - DNA, 23 bp, Homo sapiens
  source 1..23: mol_type = genomic DNA
gaggatgtttggctgcgacgtgg

SEQ ID NO: 5569 - DNA, 23 bp, Homo sapiens
  source 1..23: mol_type = genomic DNA
gaggcccaggcgccttaacccgg

SEQ ID NO: 5570 - DNA, 23 bp, Homo sapiens
  source 1..23: mol_type = genomic DNA
gaggcccaggcgcctttacccgg

SEQ ID NO: 5571 - DNA, 23 bp, Homo sapiens
  source 1..23: mol_type = genomic DNA
gaggcccaggcgcctttagccgg

SEQ ID NO: 5572 - DNA, 23 bp, Homo sapiens
  source 1..23: mol_type = genomic DNA
gaggcctgagtattgggaccagg

SEQ ID NO: 5573 - DNA, 23 bp, Homo sapiens
  source 1..23: mol_type = genomic DNA
gaggctcttgaagtcacaaaggg

SEQ ID NO: 5574 - DNA, 23 bp, Homo sapiens
  source 1..23: mol_type = genomic DNA
gagggaaaaggcctaggtaatgg

SEQ ID NO: 5575 - DNA, 23 bp, Homo sapiens
  source 1..23: mol_type = genomic DNA
gagggaaaaggcctgggtaatgg

SEQ ID NO: 5576 - DNA, 23 bp, Homo sapiens
  source 1..23: mol_type = genomic DNA
gagggacacatcagagccctggg

SEQ ID NO: 5577 - DNA, 23 bp, Homo sapiens
  source 1..23: mol_type = genomic DNA
gagggagcacaggtcagcgtggg

SEQ ID NO: 5578 - DNA, 23 bp, Homo sapiens
  source 1..23: mol_type = genomic DNA
gagggaggaacagcgacttctgg

SEQ ID NO: 5579 - DNA, 23 bp, Homo sapiens
  source 1..23: mol_type = genomic DNA
gagggcactgggaggaagcaggg

SEQ ID NO: 5580 - DNA, 23 bp, Homo sapiens
  source 1..23: mol_type = genomic DNA
gagggccccctctgctctctagg

SEQ ID NO: 5581 - DNA, 23 bp, Homo sapiens
  source 1..23: mol_type = genomic DNA
gagggccccctcttctctctagg

SEQ ID NO: 5582 - DNA, 23 bp, Homo sapiens
  source 1..23: mol_type = genomic DNA
gagggccccgtctgctctctagg

SEQ ID NO: 5583 - DNA, 23 bp, Homo sapiens
  source 1..23: mol_type = genomic DNA
gaggggaaaggcctgggtaatgg

SEQ ID NO: 5584 - DNA, 23 bp, Homo sapiens
  source 1..23: mol_type = genomic DNA
gaggggacagggaggaggcaggg

SEQ ID NO: 5585 - DNA, 23 bp, Homo sapiens
  source 1..23: mol_type = genomic DNA
gaggggacagggaggagtcaggg

SEQ ID NO: 5586 - DNA, 23 bp, Homo sapiens
  source 1..23: mol_type = genomic DNA
gaggggactgggaggaagcaggg

SEQ ID NO: 5587 - DNA, 23 bp, Homo sapiens
  source 1..23: mol_type = genomic DNA
gaggggactgggaggaggcaggg

SEQ ID NO: 5588 - DNA, 23 bp, Homo sapiens
  source 1..23: mol_type = genomic DNA
gaggggagccccgggcgccgtgg

SEQ ID NO: 5589 - DNA, 23 bp, Homo sapiens
  source 1..23: mol_type = genomic DNA
gaggggagccgcgggagccgtgg

SEQ ID NO: 5590 - DNA, 23 bp, Homo sapiens
  source 1..23: mol_type = genomic DNA
gaggggagccgcgggcgccgtgg

SEQ ID NO: 5591 - DNA, 23 bp, Homo sapiens
  source 1..23: mol_type = genomic DNA
gaggggccggagtattgggacgg

SEQ ID NO: 5592 - DNA, 23 bp, Homo sapiens
  source 1..23: mol_type = genomic DNA
gaggggtcatatctcttctcagg

SEQ ID NO: 5593 - DNA, 23 bp, Homo sapiens
  source 1..23: mol_type = genomic DNA
gaggggtcatatctgttctcagg

SEQ ID NO: 5594 - DNA, 23 bp, Homo sapiens
  source 1..23: mol_type = genomic DNA
gaggggtcatgtgtcttctcagg

SEQ ID NO: 5595 - DNA, 23 bp, Homo sapiens
  source 1..23: mol_type = genomic DNA
gaggggtgatgtgtcttctcagg

SEQ ID NO: 5596 - DNA, 23 bp, Homo sapiens
  source 1..23: mol_type = genomic DNA
gagggtcatggtggacatcgggg

SEQ ID NO: 5597 - DNA, 23 bp, Homo sapiens
  source 1..23: mol_type = genomic DNA
gagggtcatggtggacatggggg

SEQ ID NO: 5598 - DNA, 23 bp, Homo sapiens
  source 1..23: mol_type = genomic DNA
gagggtccggagtattgggacgg

SEQ ID NO: 5599 - DNA, 23 bp, Homo sapiens
  source 1..23: mol_type = genomic DNA
gagggtctgggcgggtcccgcgg

SEQ ID NO: 5600 - DNA, 23 bp, Homo sapiens
  source 1..23: mol_type = genomic DNA
gagggtgtgagaacctggcccgg

SEQ ID NO: 5601 - DNA, 23 bp, Homo sapiens
  source 1..23: mol_type = genomic DNA
gagggttcggggcgccatgacgg

SEQ ID NO: 5602 - DNA, 23 bp, Homo sapiens
  source 1..23: mol_type = genomic DNA
gagggttcggggcgccatgatgg

SEQ ID NO: 5603 - DNA, 23 bp, Homo sapiens
  source 1..23: mol_type = genomic DNA
gagggttcggggcggcatgacgg

SEQ ID NO: 5604 - DNA, 23 bp, Homo sapiens
  source 1..23: mol_type = genomic DNA
gagggtttgggcgggtcccgcgg

SEQ ID NO: 5605 - DNA, 23 bp, Homo sapiens
  source 1..23: mol_type = genomic DNA
gaggtcgtgacctgcgccccggg

SEQ ID NO: 5606 - DNA, 23 bp, Homo sapiens
  source 1..23: mol_type = genomic DNA
gaggtgggtgggctcccccatgg

SEQ ID NO: 5607 - DNA, 23 bp, Homo sapiens
  source 1..23: mol_type = genomic DNA
gaggttcccctaagatcacatgg

SEQ ID NO: 5608 - DNA, 23 bp, Homo sapiens
  source 1..23: mol_type = genomic DNA
gaggttcccctaagatcgcatgg

SEQ ID NO: 5609 - DNA, 23 bp, Homo sapiens
  source 1..23: mol_type = genomic DNA
gaggttcccctaagattgcatgg

SEQ ID NO: 5610 - DNA, 23 bp, Homo sapiens
  source 1..23: mol_type = genomic DNA
gaggttcctctaagatctcatgg

SEQ ID NO: 5611 - DNA, 23 bp, Homo sapiens
  source 1..23: mol_type = genomic DNA
gaggttcctctaggaccttaagg

SEQ ID NO: 5612 - DNA, 23 bp, Homo sapiens
  source 1..23: mol_type = genomic DNA
gagtagcaggacgagggttcggg

SEQ ID NO: 5613 - DNA, 23 bp, Homo sapiens
  source 1..23: mol_type = genomic DNA
gagtagcaggaggagggttcggg

SEQ ID NO: 5614 - DNA, 23 bp, Homo sapiens
  source 1..23: mol_type = genomic DNA
gagtattgggacgaggagacagg

SEQ ID NO: 5615 - DNA, 23 bp, Homo sapiens
  source 1..23: mol_type = genomic DNA
gagtcatatgcgtcctggggggg

SEQ ID NO: 5616 - DNA, 23 bp, Homo sapiens
  source 1..23: mol_type = genomic DNA
gagtcatatgcgtcttggggggg

SEQ ID NO: 5617 - DNA, 23 bp, Homo sapiens
  source 1..23: mol_type = genomic DNA
gagtccaagaggggagccgcggg

SEQ ID NO: 5618 - DNA, 23 bp, Homo sapiens
  source 1..23: mol_type = genomic DNA
gagtcccggtgggtgcgtgcggg

SEQ ID NO: 5619 - DNA, 23 bp, Homo sapiens
  source 1..23: mol_type = genomic DNA
gagtccctcagcctccactcagg

SEQ ID NO: 5620 - DNA, 23 bp, Homo sapiens
  source 1..23: mol_type = genomic DNA
gagtccgagagaggagccgcggg

SEQ ID NO: 5621 - DNA, 23 bp, Homo sapiens
  source 1..23: mol_type = genomic DNA
gagtccgagaggggagccccggg

SEQ ID NO: 5622 - DNA, 23 bp, Homo sapiens
  source 1..23: mol_type = genomic DNA
gagtccgagaggggagccgcggg

SEQ ID NO: 5623 - DNA, 23 bp, Homo sapiens
  source 1..23: mol_type = genomic DNA
gagtccgaggaaggagccgcggg

SEQ ID NO: 5624 - DNA, 23 bp, Homo sapiens
  source 1..23: mol_type = genomic DNA
gagtccgaggacggagccccggg

SEQ ID NO: 5625 - DNA, 23 bp, Homo sapiens
  source 1..23: mol_type = genomic DNA
gagtccgaggatggcgccccggg

SEQ ID NO: 5626 - DNA, 23 bp, Homo sapiens
  source 1..23: mol_type = genomic DNA
gagtcctgcagcctccactcagg

SEQ ID NO: 5627 - DNA, 23 bp, Homo sapiens
  source 1..23: mol_type = genomic DNA
gagtccttcagcctccactcagg

SEQ ID NO: 5628 - DNA, 23 bp, Homo sapiens
  source 1..23: mol_type = genomic DNA
gagtccttcggcctccactcagg

SEQ ID NO: 5629 - DNA, 23 bp, Homo sapiens
  source 1..23: mol_type = genomic DNA
gagtctctcagcctccactcagg

SEQ ID NO: 5630 - DNA, 23 bp, Homo sapiens
  source 1..23: mol_type = genomic DNA
gagtctctcatcacttgtaaagg

SEQ ID NO: 5631 - DNA, 23 bp, Homo sapiens
  source 1..23: mol_type = genomic DNA
gagtctctcatcgcttgtaaagg

SEQ ID NO: 5632 - DNA, 23 bp, Homo sapiens
  source 1..23: mol_type = genomic DNA
gagtctctgagcggggaacaggg

SEQ ID NO: 5633 - DNA, 23 bp, Homo sapiens
  source 1..23: mol_type = genomic DNA
gagtctctgagtggggaacaggg

SEQ ID NO: 5634 - DNA, 23 bp, Homo sapiens
  source 1..23: mol_type = genomic DNA
gagtgcgtggagtggctccgcgg

SEQ ID NO: 5635 - DNA, 23 bp, Homo sapiens
  source 1..23: mol_type = genomic DNA
gagtgggcgggggggcggggagg

SEQ ID NO: 5636 - DNA, 23 bp, Homo sapiens
  source 1..23: mol_type = genomic DNA
gagtgggcggggggggtggtggg

SEQ ID NO: 5637 - DNA, 23 bp, Homo sapiens
  source 1..23: mol_type = genomic DNA
gagttcttcagcctccactcagg

SEQ ID NO: 5638 - DNA, 23 bp, Homo sapiens
  source 1..23: mol_type = genomic DNA
gagttttcttgtcccactggggg

SEQ ID NO: 5639 - DNA, 23 bp, Homo sapiens
  source 1..23: mol_type = genomic DNA
gataatgtatggctgcgacgtgg

SEQ ID NO: 5640 - DNA, 23 bp, Homo sapiens
  source 1..23: mol_type = genomic DNA
gatagccacatgtgtgctggagg

SEQ ID NO: 5641 - DNA, 23 bp, Homo sapiens
  source 1..23: mol_type = genomic DNA
gatagtcacatgggcgctgttgg

SEQ ID NO: 5642 - DNA, 23 bp, Homo sapiens
  source 1..23: mol_type = genomic DNA
gatcacactgacctggcagcggg

SEQ ID NO: 5643 - DNA, 23 bp, Homo sapiens
  source 1..23: mol_type = genomic DNA
gatcacactgacctggcagtggg

SEQ ID NO: 5644 - DNA, 23 bp, Homo sapiens
  source 1..23: mol_type = genomic DNA
gatcaccaagcgcaagtgggagg

SEQ ID NO: 5645 - DNA, 23 bp, Homo sapiens
  source 1..23: mol_type = genomic DNA
gatcacccagcgcaagtgggagg

SEQ ID NO: 5646 - DNA, 23 bp, Homo sapiens
  source 1..23: mol_type = genomic DNA
gatcacccagcgcaagttggagg

SEQ ID NO: 5647 - DNA, 23 bp, Homo sapiens
  source 1..23: mol_type = genomic DNA
gatcacccagctcaagtgggagg

SEQ ID NO: 5648 - DNA, 23 bp, Homo sapiens
  source 1..23: mol_type = genomic DNA
gatccacccccctgaggccgcgg

SEQ ID NO: 5649 - DNA, 23 bp, Homo sapiens
  source 1..23: mol_type = genomic DNA
gatcccgcactcaccggcccagg

SEQ ID NO: 5650 - DNA, 23 bp, Homo sapiens
  source 1..23: mol_type = genomic DNA
gatccgaccccctgaggccgcgg

SEQ ID NO: 5651 - DNA, 23 bp, Homo sapiens
  source 1..23: mol_type = genomic DNA
gatccgcccccctgaggccgcgg

SEQ ID NO: 5652 - DNA, 23 bp, Homo sapiens
  source 1..23: mol_type = genomic DNA
gatccgcccgaccctcctcccgg

SEQ ID NO: 5653 - DNA, 23 bp, Homo sapiens
  source 1..23: mol_type = genomic DNA
gatccgcctccctgaggccgcgg

SEQ ID NO: 5654 - DNA, 23 bp, Homo sapiens
  source 1..23: mol_type = genomic DNA
gatctcagacccggagactcggg

SEQ ID NO: 5655 - DNA, 23 bp, Homo sapiens
  source 1..23: mol_type = genomic DNA
gatctcagaccgggagactcggg

SEQ ID NO: 5656 - DNA, 23 bp, Homo sapiens
  source 1..23: mol_type = genomic DNA
gatctcagaccgggagacttggg

SEQ ID NO: 5657 - DNA, 23 bp, Homo sapiens
  source 1..23: mol_type = genomic DNA
gatctcagacggggagactcggg

SEQ ID NO: 5658 - DNA, 23 bp, Homo sapiens
  source 1..23: mol_type = genomic DNA
gatctcagacggggagactctgg

SEQ ID NO: 5659 - DNA, 23 bp, Homo sapiens
  source 1..23: mol_type = genomic DNA
gatctcccagcgcaagtgggagg

SEQ ID NO: 5660 - DNA, 23 bp, Homo sapiens
  source 1..23: mol_type = genomic DNA
gatctcccagcgcaagttggagg

SEQ ID NO: 5661 - DNA, 23 bp, Homo sapiens
  source 1..23: mol_type = genomic DNA
gatctcggacccggagactcggg

SEQ ID NO: 5662 - DNA, 23 bp, Homo sapiens
  source 1..23: mol_type = genomic DNA
gatctcggacccggagactgtgg

SEQ ID NO: 5663 - DNA, 23 bp, Homo sapiens
  source 1..23: mol_type = genomic DNA
gatctgagccgccgtgtccgcgg

SEQ ID NO: 5664 - DNA, 23 bp, Homo sapiens
  source 1..23: mol_type = genomic DNA
gatctgagccgccttgtccgcgg

SEQ ID NO: 5665 - DNA, 23 bp, Homo sapiens
  source 1..23: mol_type = genomic DNA
gatctgagccgctgtgtccgcgg

SEQ ID NO: 5666 - DNA, 23 bp, Homo sapiens
  source 1..23: mol_type = genomic DNA
gatgatgtatggctgccacgtgg

SEQ ID NO: 5667 - DNA, 23 bp, Homo sapiens
  source 1..23: mol_type = genomic DNA
gatgatgtatggctgcgacgtgg

SEQ ID NO: 5668 - DNA, 23 bp, Homo sapiens
  source 1..23: mol_type = genomic DNA
gatgatgtttggctgcgacgtgg

SEQ ID NO: 5669 - DNA, 23 bp, Homo sapiens
  source 1..23: mol_type = genomic DNA
gatgattggagagggagcacagg

SEQ ID NO: 5670 - DNA, 23 bp, Homo sapiens
  source 1..23: mol_type = genomic DNA
gatgattggggagggagcacagg

SEQ ID NO: 5671 - DNA, 23 bp, Homo sapiens
  source 1..23: mol_type = genomic DNA
gatgcccaagttggggatggtgg

SEQ ID NO: 5672 - DNA, 23 bp, Homo sapiens
  source 1..23: mol_type = genomic DNA
gatgcccacaatggggatggtgg

SEQ ID NO: 5673 - DNA, 23 bp, Homo sapiens
  source 1..23: mol_type = genomic DNA
gatgcccacgatggggacggtgg

SEQ ID NO: 5674 - DNA, 23 bp, Homo sapiens
  source 1..23: mol_type = genomic DNA
gatgcccacgatggggatggtgg

SEQ ID NO: 5675 - DNA, 23 bp, Homo sapiens
  source 1..23: mol_type = genomic DNA
gatgcccacgatgtggacggtgg

SEQ ID NO: 5676 - DNA, 23 bp, Homo sapiens
  source 1..23: mol_type = genomic DNA
gatgcccatgatggggatggtgg

SEQ ID NO: 5677 - DNA, 23 bp, Homo sapiens
  source 1..23: mol_type = genomic DNA
gatgctgcatcccagtaatgagg

SEQ ID NO: 5678 - DNA, 23 bp, Homo sapiens
  source 1..23: mol_type = genomic DNA
gatgctgcttcccagtaatgagg

SEQ ID NO: 5679 - DNA, 23 bp, Homo sapiens
  source 1..23: mol_type = genomic DNA
gatggacaggacacctgggatgg

SEQ ID NO: 5680 - DNA, 23 bp, Homo sapiens
  source 1..23: mol_type = genomic DNA
gatggccacatgcatgctggtgg

SEQ ID NO: 5681 - DNA, 23 bp, Homo sapiens
  source 1..23: mol_type = genomic DNA
gatggccacatgcgtgctggtgg

SEQ ID NO: 5682 - DNA, 23 bp, Homo sapiens
  source 1..23: mol_type = genomic DNA
gatggggtaaggagggagacggg

SEQ ID NO: 5683 - DNA, 23 bp, Homo sapiens
  source 1..23: mol_type = genomic DNA
gatggggtaaggagggagatggg

SEQ ID NO: 5684 - DNA, 23 bp, Homo sapiens
  source 1..23: mol_type = genomic DNA
gatggtcacatgggcactgttgg

SEQ ID NO: 5685 - DNA, 23 bp, Homo sapiens
  source 1..23: mol_type = genomic DNA
gatggtcacatgggcgctgctgg

SEQ ID NO: 5686 - DNA, 23 bp, Homo sapiens
  source 1..23: mol_type = genomic DNA
gatggtcacatgggcgctgttgg

SEQ ID NO: 5687 - DNA, 23 bp, Homo sapiens
  source 1..23: mol_type = genomic DNA
gatggtcacatgggtgctgttgg

SEQ ID NO: 5688 - DNA, 23 bp, Homo sapiens
  source 1..23: mol_type = genomic DNA
gatggtgcttcccagtaacgagg

SEQ ID NO: 5689 - DNA, 23 bp, Homo sapiens
  source 1..23: mol_type = genomic DNA
gatggtgtgagaacctggcccgg

SEQ ID NO: 5690 - DNA, 23 bp, Homo sapiens
  source 1..23: mol_type = genomic DNA
gatgtaatccttgccgtcgtagg

SEQ ID NO: 5691 - DNA, 23 bp, Homo sapiens
  source 1..23: mol_type = genomic DNA
gatgtaatccttgccgtcttagg

SEQ ID NO: 5692 - DNA, 23 bp, Homo sapiens
  source 1..23: mol_type = genomic DNA
gatgtaatctttgccgtcgtagg

SEQ ID NO: 5693 - DNA, 23 bp, Homo sapiens
  source 1..23: mol_type = genomic DNA
gatgtgtgttgggtgttgggcgg

SEQ ID NO: 5694 - DNA, 23 bp, Homo sapiens
  source 1..23: mol_type = genomic DNA
gatgtgtgttgggtgttgggggg

SEQ ID NO: 5695 - DNA, 23 bp, Homo sapiens
  source 1..23: mol_type = genomic DNA
gatgtgtgttgggtgttgggtgg

SEQ ID NO: 5696 - DNA, 23 bp, Homo sapiens
  source 1..23: mol_type = genomic DNA
gattccagcattcatgagtcagg

SEQ ID NO: 5697 - DNA, 23 bp, Homo sapiens
  source 1..23: mol_type = genomic DNA
gattccagcattcgtgagtcagg

SEQ ID NO: 5698 - DNA, 23 bp, Homo sapiens
  source 1..23: mol_type = genomic DNA
gattggggagtcacagccttggg

SEQ ID NO: 5699 - DNA, 23 bp, Homo sapiens
  source 1..23: mol_type = genomic DNA
gattggggagtcccagccttggg

SEQ ID NO: 5700 - DNA, 23 bp, Homo sapiens
  source 1..23: mol_type = genomic DNA
gattgtgggtggtgcttcccagg

SEQ ID NO: 5701 - DNA, 23 bp, Homo sapiens
  source 1..23: mol_type = genomic DNA
gatttcagcattcatgagtcagg

SEQ ID NO: 5702 - DNA, 23 bp, Homo sapiens
  source 1..23: mol_type = genomic DNA
gcaaaccctcatgctgcacatgg

SEQ ID NO: 5703 - DNA, 23 bp, Homo sapiens
  source 1..23: mol_type = genomic DNA
gcaacgggcccgcctggcggggg

SEQ ID NO: 5704 - DNA, 23 bp, Homo sapiens
  source 1..23: mol_type = genomic DNA
gcaagaggggccggagtattggg

SEQ ID NO: 5705 - DNA, 23 bp, Homo sapiens
  source 1..23: mol_type = genomic DNA
gcaaggggcccgcccggcggggg

SEQ ID NO: 5706 - DNA, 23 bp, Homo sapiens
  source 1..23: mol_type = genomic DNA
gcaaggggcccgcctggcggggg

SEQ ID NO: 5707 - DNA, 23 bp, Homo sapiens
  source 1..23: mol_type = genomic DNA
gcaaggggccctcctggcggggg

SEQ ID NO: 5708 - DNA, 23 bp, Homo sapiens
  source 1..23: mol_type = genomic DNA
gcaagggtctcggggtcccgcgg

SEQ ID NO: 5709 - DNA, 23 bp, Homo sapiens
  source 1..23: mol_type = genomic DNA
gcaagtgggaggcggcccgtcgg

SEQ ID NO: 5710 - DNA, 23 bp, Homo sapiens
  source 1..23: mol_type = genomic DNA
gcaagtgggaggcggcccgttgg

SEQ ID NO: 5711 - DNA, 23 bp, Homo sapiens
  source 1..23: mol_type = genomic DNA
gcaatggggaggcgcagcgttgg

SEQ ID NO: 5712 - DNA, 23 bp, Homo sapiens
  source 1..23: mol_type = genomic DNA
gcacacttctacctgggtcttgg

SEQ ID NO: 5713 - DNA, 23 bp, Homo sapiens
  source 1..23: mol_type = genomic DNA
gcacagaacccagacaccagcgg

SEQ ID NO: 5714 - DNA, 23 bp, Homo sapiens
  source 1..23: mol_type = genomic DNA
gcacagaacccagaccagcctgg

SEQ ID NO: 5715 - DNA, 23 bp, Homo sapiens
  source 1..23: mol_type = genomic DNA
gcacaggtcagcgtgggaagagg

SEQ ID NO: 5716 - DNA, 23 bp, Homo sapiens
  source 1..23: mol_type = genomic DNA
gcacatgtgacaatgaagcacgg

SEQ ID NO: 5717 - DNA, 23 bp, Homo sapiens
  source 1..23: mol_type = genomic DNA
gcacatgtgacaatgaaggacgg

SEQ ID NO: 5718 - DNA, 23 bp, Homo sapiens
  source 1..23: mol_type = genomic DNA
gcacatgtgacaatgaaggatgg

SEQ ID NO: 5719 - DNA, 23 bp, Homo sapiens
  source 1..23: mol_type = genomic DNA
gcacatttctagctggggcttgg

SEQ ID NO: 5720 - DNA, 23 bp, Homo sapiens
  source 1..23: mol_type = genomic DNA
gcaccgtggatagagcaggaggg

SEQ ID NO: 5721 - DNA, 23 bp, Homo sapiens
  source 1..23: mol_type = genomic DNA
gcacgcatgtggccattttgagg

SEQ ID NO: 5722 - DNA, 23 bp, Homo sapiens
  source 1..23: mol_type = genomic DNA
gcacggatgtatcaccttgatgg

SEQ ID NO: 5723 - DNA, 23 bp, Homo sapiens
  source 1..23: mol_type = genomic DNA
gcacgggtaccaggggccacggg

SEQ ID NO: 5724 - DNA, 23 bp, Homo sapiens
  source 1..23: mol_type = genomic DNA
gcacgggtaccgggggccacggg

SEQ ID NO: 5725 - DNA, 23 bp, Homo sapiens
  source 1..23: mol_type = genomic DNA
gcactcacaggcccaggtctcgg

SEQ ID NO: 5726 - DNA, 23 bp, Homo sapiens
  source 1..23: mol_type = genomic DNA
gcactcaccagcccaggtctcgg

SEQ ID NO: 5727 - DNA, 23 bp, Homo sapiens
  source 1..23: mol_type = genomic DNA
gcactcacccgcccaggtctggg

SEQ ID NO: 5728 - DNA, 23 bp, Homo sapiens
  source 1..23: mol_type = genomic DNA
gcactcacccgccctggtctggg

SEQ ID NO: 5729 - DNA, 23 bp, Homo sapiens
  source 1..23: mol_type = genomic DNA
gcactcaccggcccaggtctcgg

SEQ ID NO: 5730 - DNA, 23 bp, Homo sapiens
  source 1..23: mol_type = genomic DNA
gcactcacctgcccaggtctggg

SEQ ID NO: 5731 - DNA, 23 bp, Homo sapiens
  source 1..23: mol_type = genomic DNA
gcactggggaggcgccgcgttgg

SEQ ID NO: 5732 - DNA, 23 bp, Homo sapiens
  source 1..23: mol_type = genomic DNA
gcactgtcactgcctggggtagg

SEQ ID NO: 5733 - DNA, 23 bp, Homo sapiens
  source 1..23: mol_type = genomic DNA
gcagaccctcatgctgcacatgg

SEQ ID NO: 5734 - DNA, 23 bp, Homo sapiens
  source 1..23: mol_type = genomic DNA
gcagcagagagcctacctggagg

SEQ ID NO: 5735 - DNA, 23 bp, Homo sapiens
  source 1..23: mol_type = genomic DNA
gcagccaaacatcatctggaggg

SEQ ID NO: 5736 - DNA, 23 bp, Homo sapiens
  source 1..23: mol_type = genomic DNA
gcagccaaacatccactggaggg

SEQ ID NO: 5737 - DNA, 23 bp, Homo sapiens
  source 1..23: mol_type = genomic DNA
gcagccaaacatcctctggaggg

SEQ ID NO: 5738 - DNA, 23 bp, Homo sapiens
  source 1..23: mol_type = genomic DNA
gcagccacacatccactggaggg

SEQ ID NO: 5739 - DNA, 23 bp, Homo sapiens
  source 1..23: mol_type = genomic DNA
gcagccacacatcctctggacgg

SEQ ID NO: 5740 - DNA, 23 bp, Homo sapiens
  source 1..23: mol_type = genomic DNA
gcagccagacatcctctggaggg

SEQ ID NO: 5741 - DNA, 23 bp, Homo sapiens
  source 1..23: mol_type = genomic DNA
gcagccagacatcctctggatgg

SEQ ID NO: 5742 - DNA, 23 bp, Homo sapiens
  source 1..23: mol_type = genomic DNA
gcagccatacatattctggaggg

SEQ ID NO: 5743 - DNA, 23 bp, Homo sapiens
  source 1..23: mol_type = genomic DNA
gcagccatacatcatctggatgg

SEQ ID NO: 5744 - DNA, 23 bp, Homo sapiens
  source 1..23: mol_type = genomic DNA
gcagccatacatccactggaggg

SEQ ID NO: 5745 - DNA, 23 bp, Homo sapiens
  source 1..23: mol_type = genomic DNA
gcagccatacatcctctggaagg

SEQ ID NO: 5746 - DNA, 23 bp, Homo sapiens
  source 1..23: mol_type = genomic DNA
gcagccatacatcctctggacgg

SEQ ID NO: 5747 - DNA, 23 bp, Homo sapiens
  source 1..23: mol_type = genomic DNA
gcagccatacatcctctggaggg

SEQ ID NO: 5748 - DNA, 23 bp, Homo sapiens
  source 1..23: mol_type = genomic DNA
gcagccatacatcctctggatgg

SEQ ID NO: 5749 - DNA, 23 bp, Homo sapiens
  source 1..23: mol_type = genomic DNA
gcagccatacattatctggatgg

SEQ ID NO: 5750 - DNA, 23 bp, Homo sapiens
  source 1..23: mol_type = genomic DNA
gcagcccctcatgctgtacatgg

SEQ ID NO: 5751 - DNA, 23 bp, Homo sapiens
  source 1..23: mol_type = genomic DNA
gcagcccctcgtgctgaacatgg

SEQ ID NO: 5752 - DNA, 23 bp, Homo sapiens
  source 1..23: mol_type = genomic DNA
gcagcccctcgtgctgcacatgg

SEQ ID NO: 5753 - DNA, 23 bp, Homo sapiens
  source 1..23: mol_type = genomic DNA
gcagcccctcgtgctgcatatgg

SEQ ID NO: 5754 - DNA, 23 bp, Homo sapiens
  source 1..23: mol_type = genomic DNA
gcagccgtacatccactggaggg

SEQ ID NO: 5755 - DNA, 23 bp, Homo sapiens
  source 1..23: mol_type = genomic DNA
gcagccgtacatcctctggaggg

SEQ ID NO: 5756 - DNA, 23 bp, Homo sapiens
  source 1..23: mol_type = genomic DNA
gcagccgtacatgctctggaggg

SEQ ID NO: 5757 - DNA, 23 bp, Homo sapiens
  source 1..23: mol_type = genomic DNA
gcagcggagagcctacctggagg

SEQ ID NO: 5758 - DNA, 23 bp, Homo sapiens
  source 1..23: mol_type = genomic DNA
gcagcggagagtctacctggagg

SEQ ID NO: 5759 - DNA, 23 bp, Homo sapiens
  source 1..23: mol_type = genomic DNA
gcagctgagaacctacctggagg

SEQ ID NO: 5760 - DNA, 23 bp, Homo sapiens
  source 1..23: mol_type = genomic DNA
gcagctgagagcctacctggagg

SEQ ID NO: 5761 - DNA, 23 bp, Homo sapiens
  source 1..23: mol_type = genomic DNA
gcagctgtgatggtgccttctgg

SEQ ID NO: 5762 - DNA, 23 bp, Homo sapiens
  source 1..23: mol_type = genomic DNA
gcagctgtggtggtaccttctgg

SEQ ID NO: 5763 - DNA, 23 bp, Homo sapiens
  source 1..23: mol_type = genomic DNA
gcagctgtggtggtgccttctgg

SEQ ID NO: 5764 - DNA, 23 bp, Homo sapiens
  source 1..23: mol_type = genomic DNA
gcaggacagagcctacctggagg

SEQ ID NO: 5765 - DNA, 23 bp, Homo sapiens
  source 1..23: mol_type = genomic DNA
gcaggaccatgagatcttagagg

SEQ ID NO: 5766 - DNA, 23 bp, Homo sapiens
  source 1..23: mol_type = genomic DNA
gcaggacgcctacgacggcaagg

SEQ ID NO: 5767 - DNA, 23 bp, Homo sapiens
  source 1..23: mol_type = genomic DNA
gcaggacgcttacgacggcaagg

SEQ ID NO: 5768 - DNA, 23 bp, Homo sapiens
  source 1..23: mol_type = genomic DNA
gcaggagaggcctgagtattggg

SEQ ID NO: 5769 - DNA, 23 bp, Homo sapiens
  source 1..23: mol_type = genomic DNA
gcaggaggagccggagtattggg

SEQ ID NO: 5770 - DNA, 23 bp, Homo sapiens
  source 1..23: mol_type = genomic DNA
gcaggaggggccggaatattggg

SEQ ID NO: 5771 - DNA, 23 bp, Homo sapiens
  source 1..23: mol_type = genomic DNA
gcaggaggggccggagtattggg

SEQ ID NO: 5772 - DNA, 23 bp, Homo sapiens
  source 1..23: mol_type = genomic DNA
gcaggagggtccggagtattggg

SEQ ID NO: 5773 - DNA, 23 bp, Homo sapiens
  source 1..23: mol_type = genomic DNA
gcaggcgggggcgcaggacccgg

SEQ ID NO: 5774 - DNA, 23 bp, Homo sapiens
  source 1..23: mol_type = genomic DNA
gcaggcgggggctcaggacccgg

SEQ ID NO: 5775 - DNA, 23 bp, Homo sapiens
  source 1..23: mol_type = genomic DNA
gcagggaaatggcctctgtaggg

SEQ ID NO: 5776 - DNA, 23 bp, Homo sapiens
  source 1..23: mol_type = genomic DNA
gcagggaaatggcctctgtgggg

SEQ ID NO: 5777 - DNA, 23 bp, Homo sapiens
  source 1..23: mol_type = genomic DNA
gcagggaacacttctacctgggg

SEQ ID NO: 5778 - DNA, 23 bp, Homo sapiens
  source 1..23: mol_type = genomic DNA
gcagggccatgagatcttagagg

SEQ ID NO: 5779 - DNA, 23 bp, Homo sapiens
  source 1..23: mol_type = genomic DNA
gcagggccatgcaatcttagggg

SEQ ID NO: 5780 - DNA, 23 bp, Homo sapiens
  source 1..23: mol_type = genomic DNA
gcagggccatgcgatcttagggg

SEQ ID NO: 5781 - DNA, 23 bp, Homo sapiens
  source 1..23: mol_type = genomic DNA
gcagggccatgtgatcttagggg

SEQ ID NO: 5782 - DNA, 23 bp, Homo sapiens
  source 1..23: mol_type = genomic DNA
gcagggtccccaggtccactcgg

SEQ ID NO: 5783 - DNA, 23 bp, Homo sapiens
  source 1..23: mol_type = genomic DNA
gcagggtccccaggttcgctcgg

SEQ ID NO: 5784 - DNA, 23 bp, Homo sapiens
  source 1..23: mol_type = genomic DNA
gcagggtccccaggttctctcgg

SEQ ID NO: 5785 - DNA, 23 bp, Homo sapiens
  source 1..23: mol_type = genomic DNA
gcagggtccgcaggctctctcgg

SEQ ID NO: 5786 - DNA, 23 bp, Homo sapiens
  source 1..23: mol_type = genomic DNA
gcagggtccgcaggtcctctcgg

SEQ ID NO: 5787 - DNA, 23 bp, Homo sapiens
  source 1..23: mol_type = genomic DNA
gcaggttccgcaggctcactcgg

SEQ ID NO: 5788 - DNA, 23 bp, Homo sapiens
  source 1..23: mol_type = genomic DNA
gcaggttccgcaggctctctcgg

SEQ ID NO: 5789 - DNA, 23 bp, Homo sapiens
  source 1..23: mol_type = genomic DNA
gcaggttccgcaggttcactcgg

SEQ ID NO: 5790 - DNA, 23 bp, Homo sapiens
  source 1..23: mol_type = genomic DNA
gcaggttccgcaggttctctcgg

SEQ ID NO: 5791 - DNA, 23 bp, Homo sapiens
  source 1..23: mol_type = genomic DNA
gcagtggagagcctacctggagg

SEQ ID NO: 5792 - DNA, 23 bp, Homo sapiens
  source 1..23: mol_type = genomic DNA
gcagtggtcaaagtggtcaaagg

SEQ ID NO: 5793 - DNA, 23 bp, Homo sapiens
  source 1..23: mol_type = genomic DNA
gcagttgagagcctacctggagg

SEQ ID NO: 5794 - DNA, 23 bp, Homo sapiens
  source 1..23: mol_type = genomic DNA
gcagtttccgcaggttcactcgg

SEQ ID NO: 5795 - DNA, 23 bp, Homo sapiens
  source 1..23: mol_type = genomic DNA
gcatggcctcccacgaggagggg

SEQ ID NO: 5796 - DNA, 23 bp, Homo sapiens
  source 1..23: mol_type = genomic DNA
gcatgtacggctgcgacgtgggg

SEQ ID NO: 5797 - DNA, 23 bp, Homo sapiens
  source 1..23: mol_type = genomic DNA
gcatgtggccatcttgagaatgg

SEQ ID NO: 5798 - DNA, 23 bp, Homo sapiens
  source 1..23: mol_type = genomic DNA
gcatgtggccattttgaggatgg

SEQ ID NO: 5799 - DNA, 23 bp, Homo sapiens
  source 1..23: mol_type = genomic DNA
gcatgtgtctgtgttcatgtagg

SEQ ID NO: 5800 - DNA, 23 bp, Homo sapiens
  source 1..23: mol_type = genomic DNA
gcatgtgtctgtgttcgtgtagg

SEQ ID NO: 5801 - DNA, 23 bp, Homo sapiens
  source 1..23: mol_type = genomic DNA
gcatgtgtctgtgttcttgtagg

SEQ ID NO: 5802 - DNA, 23 bp, Homo sapiens
  source 1..23: mol_type = genomic DNA
gcattggggaggcgcagcattgg

SEQ ID NO: 5803 - DNA, 23 bp, Homo sapiens
  source 1..23: mol_type = genomic DNA
gcattggggaggcgcagcgttgg

SEQ ID NO: 5804 - DNA, 23 bp, Homo sapiens
  source 1..23: mol_type = genomic DNA
gcattggggaggcgccgcgttgg

SEQ ID NO: 5805 - DNA, 23 bp, Homo sapiens
  source 1..23: mol_type = genomic DNA
gccacctggcccgtccgtggggg

SEQ ID NO: 5806 - DNA, 23 bp, Homo sapiens
  source 1..23: mol_type = genomic DNA
gccagaaacgatgcccaagttgg

SEQ ID NO: 5807 - DNA, 23 bp, Homo sapiens
  source 1..23: mol_type = genomic DNA
gccagaccctcctcccggcgcgg

SEQ ID NO: 5808 - DNA, 23 bp, Homo sapiens
  source 1..23: mol_type = genomic DNA
gccagcaacaatgcccacgatgg

SEQ ID NO: 5809 - DNA, 23 bp, Homo sapiens
  source 1..23: mol_type = genomic DNA
gccagcaacgatgcccacgatgg

SEQ ID NO: 5810 - DNA, 23 bp, Homo sapiens
  source 1..23: mol_type = genomic DNA
gccagcaacgatgcccatgatgg

SEQ ID NO: 5811 - DNA, 23 bp, Homo sapiens
  source 1..23: mol_type = genomic DNA
gccagcaaggatgcccacgatgg

SEQ ID NO: 5812 - DNA, 23 bp, Homo sapiens
  source 1..23: mol_type = genomic DNA
gccagcaatgatgcccacaatgg

SEQ ID NO: 5813 - DNA, 23 bp, Homo sapiens
  source 1..23: mol_type = genomic DNA
gccagcaatgatgcccacgatgg

SEQ ID NO: 5814 - DNA, 23 bp, Homo sapiens
  source 1..23: mol_type = genomic DNA
gccaggacagccaggacagctgg

SEQ ID NO: 5815 - DNA, 23 bp, Homo sapiens
  source 1..23: mol_type = genomic DNA
gccagggtctcacatcatccagg

SEQ ID NO: 5816 - DNA, 23 bp, Homo sapiens
  source 1..23: mol_type = genomic DNA
gccaggtcacccacagtctccgg

SEQ ID NO: 5817 - DNA, 23 bp, Homo sapiens
  source 1..23: mol_type = genomic DNA
gccaggtcagggctgaggcttgg

SEQ ID NO: 5818 - DNA, 23 bp, Homo sapiens
  source 1..23: mol_type = genomic DNA
gccaggtcgcccacagtctccgg

SEQ ID NO: 5819 - DNA, 23 bp, Homo sapiens
  source 1..23: mol_type = genomic DNA
gccaggtggcccacagtctccgg

SEQ ID NO: 5820 - DNA, 23 bp, Homo sapiens
  source 1..23: mol_type = genomic DNA
gccagtgagtgaccccggcccgg

SEQ ID NO: 5821 - DNA, 23 bp, Homo sapiens
  source 1..23: mol_type = genomic DNA
gccatgtcccggcccggccgcgg

SEQ ID NO: 5822 - DNA, 23 bp, Homo sapiens
  source 1..23: mol_type = genomic DNA
gccatgtcccggcctggccgcgg

SEQ ID NO: 5823 - DNA, 23 bp, Homo sapiens
  source 1..23: mol_type = genomic DNA
gccattctccattcaacggaggg

SEQ ID NO: 5824 - DNA, 23 bp, Homo sapiens
  source 1..23: mol_type = genomic DNA
gccattctccattcaagggaggg

SEQ ID NO: 5825 - DNA, 23 bp, Homo sapiens
  source 1..23: mol_type = genomic DNA
gcccacaggagacgtgggacagg

SEQ ID NO: 5826 - DNA, 23 bp, Homo sapiens
  source 1..23: mol_type = genomic DNA
gcccagccccgaccaacccgggg

SEQ ID NO: 5827 - DNA, 23 bp, Homo sapiens
  source 1..23: mol_type = genomic DNA
gcccagggcccagcacctcaggg

SEQ ID NO: 5828 - DNA, 23 bp, Homo sapiens
  source 1..23: mol_type = genomic DNA
gccccgccccgaccaacccgcgg

SEQ ID NO: 5829 - DNA, 23 bp, Homo sapiens
  source 1..23: mol_type = genomic DNA
gccccgccccgaccaacccgggg

SEQ ID NO: 5830 - DNA, 23 bp, Homo sapiens
  source 1..23: mol_type = genomic DNA
gccccgccccgaccaacctgggg

SEQ ID NO: 5831 - DNA, 23 bp, Homo sapiens
  source 1..23: mol_type = genomic DNA
gccccgccccgacccacccgggg

SEQ ID NO: 5832 - DNA, 23 bp, Homo sapiens
  source 1..23: mol_type = genomic DNA
gccccgccccgcccaacccgcgg

SEQ ID NO: 5833 - DNA, 23 bp, Homo sapiens
  source 1..23: mol_type = genomic DNA
gccccgccctgaccaacccgcgg

SEQ ID NO: 5834 - DNA, 23 bp, Homo sapiens
  source 1..23: mol_type = genomic DNA
gcccgacccacctccctgcgcgg

SEQ ID NO: 5835 - DNA, 23 bp, Homo sapiens
  source 1..23: mol_type = genomic DNA
gcccgaccctcctccaggcgcgg

SEQ ID NO: 5836 - DNA, 23 bp, Homo sapiens
  source 1..23: mol_type = genomic DNA
gcccgaccctcctcccggcgcgg

SEQ ID NO: 5837 - DNA, 23 bp, Homo sapiens
  source 1..23: mol_type = genomic DNA
gcccgaccctcctccctgcgcgg

SEQ ID NO: 5838 - DNA, 23 bp, Homo sapiens
  source 1..23: mol_type = genomic DNA
gcccgaccctcgtcccggcgcgg

SEQ ID NO: 5839 - DNA, 23 bp, Homo sapiens
  source 1..23: mol_type = genomic DNA
gcccgcaggagacgtgggacagg

SEQ ID NO: 5840 - DNA, 23 bp, Homo sapiens
  source 1..23: mol_type = genomic DNA
gcccggccccgaccaacccgggg

SEQ ID NO: 5841 - DNA, 23 bp, Homo sapiens
  source 1..23: mol_type = genomic DNA
gcccgtccgtaggggatgagggg

SEQ ID NO: 5842 - DNA, 23 bp, Homo sapiens
  source 1..23: mol_type = genomic DNA
gcccgtccgtgggggatgagagg

SEQ ID NO: 5843 - DNA, 23 bp, Homo sapiens
  source 1..23: mol_type = genomic DNA
gcccgtccgtgggggatgagggg

SEQ ID NO: 5844 - DNA, 23 bp, Homo sapiens
  source 1..23: mol_type = genomic DNA
gccctcaggagacgtgggacagg

SEQ ID NO: 5845 - DNA, 23 bp, Homo sapiens
  source 1..23: mol_type = genomic DNA
gccctcccttgaatggagaatgg

SEQ ID NO: 5846 - DNA, 23 bp, Homo sapiens
  source 1..23: mol_type = genomic DNA
gccctccgttgaatggagaatgg

SEQ ID NO: 5847 - DNA, 23 bp, Homo sapiens
  source 1..23: mol_type = genomic DNA
gccctcctcctgctgctctcggg

SEQ ID NO: 5848 - DNA, 23 bp, Homo sapiens
  source 1..23: mol_type = genomic DNA
gccctgacccagaccagggcggg

SEQ ID NO: 5849 - DNA, 23 bp, Homo sapiens
  source 1..23: mol_type = genomic DNA
gccctgacccagacctgggcagg

SEQ ID NO: 5850 - DNA, 23 bp, Homo sapiens
  source 1..23: mol_type = genomic DNA
gccctgacccagacctgggcggg

SEQ ID NO: 5851 - DNA, 23 bp, Homo sapiens
  source 1..23: mol_type = genomic DNA
gccctgaccgagacctgggccgg

SEQ ID NO: 5852 - DNA, 23 bp, Homo sapiens
  source 1..23: mol_type = genomic DNA
gccctgaccgagacctgggctgg

SEQ ID NO: 5853 - DNA, 23 bp, Homo sapiens
  source 1..23: mol_type = genomic DNA
gccctgatcgagacctggaccgg

SEQ ID NO: 5854 - DNA, 23 bp, Homo sapiens
  source 1..23: mol_type = genomic DNA
gccctgatcgagacctgggccgg

SEQ ID NO: 5855 - DNA, 23 bp, Homo sapiens
  source 1..23: mol_type = genomic DNA
gccgaaggactcagaaaagctgg

SEQ ID NO: 5856 - DNA, 23 bp, Homo sapiens
  source 1..23: mol_type = genomic DNA
gccgaaggactcagaaaagttgg

SEQ ID NO: 5857 - DNA, 23 bp, Homo sapiens
  source 1..23: mol_type = genomic DNA
gccgcgcagggaggagggtcggg

SEQ ID NO: 5858 - DNA, 23 bp, Homo sapiens
  source 1..23: mol_type = genomic DNA
gccgcgcagggaggtgggtcggg

SEQ ID NO: 5859 - DNA, 23 bp, Homo sapiens
  source 1..23: mol_type = genomic DNA
gccgcgccgggacgagggtcggg

SEQ ID NO: 5860 - DNA, 23 bp, Homo sapiens
  source 1..23: mol_type = genomic DNA
gccgcgccgggaggagggtcggg

SEQ ID NO: 5861 - DNA, 23 bp, Homo sapiens
  source 1..23: mol_type = genomic DNA
gccgcgccgggaggagggtctgg

SEQ ID NO: 5862 - DNA, 23 bp, Homo sapiens
  source 1..23: mol_type = genomic DNA
gccgcgcctggaggagggtcggg

SEQ ID NO: 5863 - DNA, 23 bp, Homo sapiens
  source 1..23: mol_type = genomic DNA
gccgggagatctacgggagatgg

SEQ ID NO: 5864 - DNA, 23 bp, Homo sapiens
  source 1..23: mol_type = genomic DNA
gccgggccaggacacggatgtgg

SEQ ID NO: 5865 - DNA, 23 bp, Homo sapiens
  source 1..23: mol_type = genomic DNA
gccgggccgggacacggatgtgg

SEQ ID NO: 5866 - DNA, 23 bp, Homo sapiens
  source 1..23: mol_type = genomic DNA
gccgggtcagggctgaggcttgg

SEQ ID NO: 5867 - DNA, 23 bp, Homo sapiens
  source 1..23: mol_type = genomic DNA
gccgggtcgcccacagtctccgg

SEQ ID NO: 5868 - DNA, 23 bp, Homo sapiens
  source 1..23: mol_type = genomic DNA
gccggtgagtgaccccagcccgg

SEQ ID NO: 5869 - DNA, 23 bp, Homo sapiens
  source 1..23: mol_type = genomic DNA
gccggtgagtgaccccgcccggg

SEQ ID NO: 5870 - DNA, 23 bp, Homo sapiens
  source 1..23: mol_type = genomic DNA
gccggtgagtgaccccggcccgg

SEQ ID NO: 5871 - DNA, 23 bp, Homo sapiens
  source 1..23: mol_type = genomic DNA
gccggtgagtgaccccggccggg

SEQ ID NO: 5872 - DNA, 23 bp, Homo sapiens
  source 1..23: mol_type = genomic DNA
gccggtgagtgaccccggcctgg

SEQ ID NO: 5873 - DNA, 23 bp, Homo sapiens
  source 1..23: mol_type = genomic DNA
gccggtgagtgcgggtcggcagg

SEQ ID NO: 5874 - DNA, 23 bp, Homo sapiens
  source 1..23: mol_type = genomic DNA
gccggtgagtgcgggtcgggagg

SEQ ID NO: 5875 - DNA, 23 bp, Homo sapiens
  source 1..23: mol_type = genomic DNA
gccggtttcattttcagtttagg

SEQ ID NO: 5876 - DNA, 23 bp, Homo sapiens
  source 1..23: mol_type = genomic DNA
gccgtccgtgggggatgaggagg

SEQ ID NO: 5877 - DNA, 23 bp, Homo sapiens
  source 1..23: mol_type = genomic DNA
gccgtccgtgggggatggggagg

SEQ ID NO: 5878 - DNA, 23 bp, Homo sapiens
  source 1..23: mol_type = genomic DNA
gccgtgtcccggcccggccgcgg

SEQ ID NO: 5879 - DNA, 23 bp, Homo sapiens
  source 1..23: mol_type = genomic DNA
gcctaaaccgaaaatgaaaccgg

SEQ ID NO: 5880 - DNA, 23 bp, Homo sapiens
  source 1..23: mol_type = genomic DNA
gcctaaactgaaaatgaaaccgg

SEQ ID NO: 5881 - DNA, 23 bp, Homo sapiens
  source 1..23: mol_type = genomic DNA
gcctcaactgaaaatgaaaccgg

SEQ ID NO: 5882 - DNA, 23 bp, Homo sapiens
  source 1..23: mol_type = genomic DNA
gcctcacactcagtgtgtttggg

SEQ ID NO: 5883 - DNA, 23 bp, Homo sapiens
  source 1..23: mol_type = genomic DNA
gcctcggggtggatctcagacgg

SEQ ID NO: 5884 - DNA, 23 bp, Homo sapiens
  source 1..23: mol_type = genomic DNA
gcctctgccgggaggagcgaggg

SEQ ID NO: 5885 - DNA, 23 bp, Homo sapiens
  source 1..23: mol_type = genomic DNA
gcctctgcggagaggagcgaggg

SEQ ID NO: 5886 - DNA, 23 bp, Homo sapiens
  source 1..23: mol_type = genomic DNA
gcctctgcggggagaagcaaggg

SEQ ID NO: 5887 - DNA, 23 bp, Homo sapiens
  source 1..23: mol_type = genomic DNA
gcctctggggagaggagcgaggg

SEQ ID NO: 5888 - DNA, 23 bp, Homo sapiens
  source 1..23: mol_type = genomic DNA
gcctctgtagggaggagcaaggg

SEQ ID NO: 5889 - DNA, 23 bp, Homo sapiens
  source 1..23: mol_type = genomic DNA
gcctctgtggggagaagcaacgg

SEQ ID NO: 5890 - DNA, 23 bp, Homo sapiens
  source 1..23: mol_type = genomic DNA
gcctctgtggggagaagcaaggg

SEQ ID NO: 5891 - DNA, 23 bp, Homo sapiens
  source 1..23: mol_type = genomic DNA
gcctctgtggggaggagagaggg

SEQ ID NO: 5892 - DNA, 23 bp, Homo sapiens
  source 1..23: mol_type = genomic DNA
gcctctgtggggaggagcgaggg

SEQ ID NO: 5893 - DNA, 23 bp, Homo sapiens
  source 1..23: mol_type = genomic DNA
gcctgagacagctgcctgtgtgg

SEQ ID NO: 5894 - DNA, 23 bp, Homo sapiens
  source 1..23: mol_type = genomic DNA
gcctgatgtgtgttgggtgttgg

SEQ ID NO: 5895 - DNA, 23 bp, Homo sapiens
  source 1..23: mol_type = genomic DNA
gcctgcatccgctggtgtctggg

SEQ ID NO: 5896 - DNA, 23 bp, Homo sapiens
  source 1..23: mol_type = genomic DNA
gcctggagtagaacaaaaacagg

SEQ ID NO: 5897 - DNA, 23 bp, Homo sapiens
  source 1..23: mol_type = genomic DNA
gcctggagtagaaccaaaacagg

SEQ ID NO: 5898 - DNA, 23 bp, Homo sapiens
  source 1..23: mol_type = genomic DNA
gcctggccctgaccgagacctgg

SEQ ID NO: 5899 - DNA, 23 bp, Homo sapiens
  source 1..23: mol_type = genomic DNA
gcctgtgtccaggctggtctggg

SEQ ID NO: 5900 - DNA, 23 bp, Homo sapiens
  source 1..23: mol_type = genomic DNA
gccttgatggttgtggtgttggg

SEQ ID NO: 5901 - DNA, 23 bp, Homo sapiens
  source 1..23: mol_type = genomic DNA
gcctttgcagaaacaaagtcagg

SEQ ID NO: 5902 - DNA, 23 bp, Homo sapiens
  source 1..23: mol_type = genomic DNA
gcgaacctggggaccctgcgcgg

SEQ ID NO: 5903 - DNA, 23 bp, Homo sapiens
  source 1..23: mol_type = genomic DNA
gcgacccggcccgtccgtggggg

SEQ ID NO: 5904 - DNA, 23 bp, Homo sapiens
  source 1..23: mol_type = genomic DNA
gcgacccgggccgtacgtggggg

SEQ ID NO: 5905 - DNA, 23 bp, Homo sapiens
  source 1..23: mol_type = genomic DNA
gcgacccgggccgtccgtggggg

SEQ ID NO: 5906 - DNA, 23 bp, Homo sapiens
  source 1..23: mol_type = genomic DNA
gcgaccgcgaagacactgattgg

SEQ ID NO: 5907 - DNA, 23 bp, Homo sapiens
  source 1..23: mol_type = genomic DNA
gcgaccgcgacgacactgattgg

SEQ ID NO: 5908 - DNA, 23 bp, Homo sapiens
  source 1..23: mol_type = genomic DNA
gcgacctggcccgtccgtagggg

SEQ ID NO: 5909 - DNA, 23 bp, Homo sapiens
  source 1..23: mol_type = genomic DNA
gcgacctggcccgtccgtggggg

SEQ ID NO: 5910 - DNA, 23 bp, Homo sapiens
  source 1..23: mol_type = genomic DNA
gcgacgccgcgagtccaagaggg

SEQ ID NO: 5911 - DNA, 23 bp, Homo sapiens
  source 1..23: mol_type = genomic DNA
gcgacgccgcgagtccgagaggg

SEQ ID NO: 5912 - DNA, 23 bp, Homo sapiens
  source 1..23: mol_type = genomic DNA
gcgaggacggtgagtgaccccgg

SEQ ID NO: 5913 - DNA, 23 bp, Homo sapiens
  source 1..23: mol_type = genomic DNA
gcgaggccagtgagtgaccccgg

SEQ ID NO: 5914 - DNA, 23 bp, Homo sapiens
  source 1..23: mol_type = genomic DNA
gcgaggccggtgagtgaccccgg

SEQ ID NO: 5915 - DNA, 23 bp, Homo sapiens
  source 1..23: mol_type = genomic DNA
gcgaggggcccgcccggcgaggg

SEQ ID NO: 5916 - DNA, 23 bp, Homo sapiens
  source 1..23: mol_type = genomic DNA
gcgaggggccctcccggcgaggg

SEQ ID NO: 5917 - DNA, 23 bp, Homo sapiens
  source 1..23: mol_type = genomic DNA
gcgatcaggaaggcgccccgtgg

SEQ ID NO: 5918 - DNA, 23 bp, Homo sapiens
  source 1..23: mol_type = genomic DNA
gcgatcagggaggcgccccgtgg

SEQ ID NO: 5919 - DNA, 23 bp, Homo sapiens
  source 1..23: mol_type = genomic DNA
gcgatcaggtaggcgccccgtgg

SEQ ID NO: 5920 - DNA, 23 bp, Homo sapiens
  source 1..23: mol_type = genomic DNA
gcgcagggaggagggtcgggcgg

SEQ ID NO: 5921 - DNA, 23 bp, Homo sapiens
  source 1..23: mol_type = genomic DNA
gcgcagggaggtgggtcgggcgg

SEQ ID NO: 5922 - DNA, 23 bp, Homo sapiens
  source 1..23: mol_type = genomic DNA
gcgcaggtaccaggggcagtggg

SEQ ID NO: 5923 - DNA, 23 bp, Homo sapiens
  source 1..23: mol_type = genomic DNA
gcgccatgacggccatcctcggg

SEQ ID NO: 5924 - DNA, 23 bp, Homo sapiens
  source 1..23: mol_type = genomic DNA
gcgccatggatagagcaagaggg

SEQ ID NO: 5925 - DNA, 23 bp, Homo sapiens
  source 1..23: mol_type = genomic DNA
gcgccatggatagagcaggaggg

SEQ ID NO: 5926 - DNA, 23 bp, Homo sapiens
  source 1..23: mol_type = genomic DNA
gcgcccgcggctccatcctccgg

SEQ ID NO: 5927 - DNA, 23 bp, Homo sapiens
  source 1..23: mol_type = genomic DNA
gcgcccgcggctccatcctctgg

SEQ ID NO: 5928 - DNA, 23 bp, Homo sapiens
  source 1..23: mol_type = genomic DNA
gcgcccgcggctccatcttctgg

SEQ ID NO: 5929 - DNA, 23 bp, Homo sapiens
  source 1..23: mol_type = genomic DNA
gcgccgggaggagggtcgggcgg

SEQ ID NO: 5930 - DNA, 23 bp, Homo sapiens
  source 1..23: mol_type = genomic DNA
gcgccgggaggagggtcgggtgg

SEQ ID NO: 5931 - DNA, 23 bp, Homo sapiens
  source 1..23: mol_type = genomic DNA
gcgccgggaggagggtctggcgg

SEQ ID NO: 5932 - DNA, 23 bp, Homo sapiens
  source 1..23: mol_type = genomic DNA
gcgccgtggatagagcaagaggg

SEQ ID NO: 5933 - DNA, 23 bp, Homo sapiens
  source 1..23: mol_type = genomic DNA
gcgccgtggatagagcaggaggg

SEQ ID NO: 5934 - DNA, 23 bp, Homo sapiens
  source 1..23: mol_type = genomic DNA
gcgccgtgggtggagcaggaggg

SEQ ID NO: 5935 - DNA, 23 bp, Homo sapiens
  source 1..23: mol_type = genomic DNA
gcgcctacctgatcgcctgtagg

SEQ ID NO: 5936 - DNA, 23 bp, Homo sapiens
  source 1..23: mol_type = genomic DNA
gcgcctccccaatgcagacaagg

SEQ ID NO: 5937 - DNA, 23 bp, Homo sapiens
  source 1..23: mol_type = genomic DNA
gcgcctccccaatgcagacacgg

SEQ ID NO: 5938 - DNA, 23 bp, Homo sapiens
  source 1..23: mol_type = genomic DNA
gcgcctccccaatgcagacgcgg

SEQ ID NO: 5939 - DNA, 23 bp, Homo sapiens
  source 1..23: mol_type = genomic DNA
gcgcctccccagtgcagacacgg

SEQ ID NO: 5940 - DNA, 23 bp, Homo sapiens
  source 1..23: mol_type = genomic DNA
gcgcctccccattgcagacgcgg

SEQ ID NO: 5941 - DNA, 23 bp, Homo sapiens
  source 1..23: mol_type = genomic DNA
gcgcctggaggagggtcgggcgg

SEQ ID NO: 5942 - DNA, 23 bp, Homo sapiens
  source 1..23: mol_type = genomic DNA
gcgcgatccgcaggctctctcgg

SEQ ID NO: 5943 - DNA, 23 bp, Homo sapiens
  source 1..23: mol_type = genomic DNA
gcgcgatccgcaggttctctcgg

SEQ ID NO: 5944 - DNA, 23 bp, Homo sapiens
  source 1..23: mol_type = genomic DNA
gcgcgggtaccaggggcagtggg

SEQ ID NO: 5945 - DNA, 23 bp, Homo sapiens
  source 1..23: mol_type = genomic DNA
gcgcggtgcgcaggttctctcgg

SEQ ID NO: 5946 - DNA, 23 bp, Homo sapiens
  source 1..23: mol_type = genomic DNA
gcgctgggtgatctgagccgcgg

SEQ ID NO: 5947 - DNA, 23 bp, Homo sapiens
  source 1..23: mol_type = genomic DNA
gcgctggtaccaggggcagtggg

SEQ ID NO: 5948 - DNA, 23 bp, Homo sapiens
  source 1..23: mol_type = genomic DNA
gcggaacccgcccagaccctcgg

SEQ ID NO: 5949 - DNA, 23 bp, Homo sapiens
  source 1..23: mol_type = genomic DNA
gcggagttggggaatccccaagg

SEQ ID NO: 5950 - DNA, 23 bp, Homo sapiens
  source 1..23: mol_type = genomic DNA
gcggccaggccgggacatggcgg

SEQ ID NO: 5951 - DNA, 23 bp, Homo sapiens
  source 1..23: mol_type = genomic DNA
gcggccgggccgggacacagcgg

SEQ ID NO: 5952 - DNA, 23 bp, Homo sapiens
  source 1..23: mol_type = genomic DNA
gcggccgggccgggacacggagg

SEQ ID NO: 5953 - DNA, 23 bp, Homo sapiens
  source 1..23: mol_type = genomic DNA
gcggccgggccgggacacggcgg

SEQ ID NO: 5954 - DNA, 23 bp, Homo sapiens
  source 1..23: mol_type = genomic DNA
gcggccgggccgggacatggagg

SEQ ID NO: 5955 - DNA, 23 bp, Homo sapiens
  source 1..23: mol_type = genomic DNA
gcggccgggccgggacatggcgg

SEQ ID NO: 5956 - DNA, 23 bp, Homo sapiens
  source 1..23: mol_type = genomic DNA
gcggcctcgggggcggatctcgg

SEQ ID NO: 5957 - DNA, 23 bp, Homo sapiens
  source 1..23: mol_type = genomic DNA
gcggctgggccgggacacagcgg

SEQ ID NO: 5958 - DNA, 23 bp, Homo sapiens
  source 1..23: mol_type = genomic DNA
gcggctgtggtggtaccttctgg

SEQ ID NO: 5959 - DNA, 23 bp, Homo sapiens
  source 1..23: mol_type = genomic DNA
gcggctgtggtggtgccttctgg

SEQ ID NO: 5960 - DNA, 23 bp, Homo sapiens
  source 1..23: mol_type = genomic DNA
gcgggacggggctgaccacgggg

SEQ ID NO: 5961 - DNA, 23 bp, Homo sapiens
  source 1..23: mol_type = genomic DNA
gcgggagccgtgggtggagcagg

SEQ ID NO: 5962 - DNA, 23 bp, Homo sapiens
  source 1..23: mol_type = genomic DNA
gcgggcaccgtggatagagcagg

SEQ ID NO: 5963 - DNA, 23 bp, Homo sapiens
  source 1..23: mol_type = genomic DNA
gcgggcgccatggatagagcagg

SEQ ID NO: 5964 - DNA, 23 bp, Homo sapiens
  source 1..23: mol_type = genomic DNA
gcgggcgccgtggatagagcagg

SEQ ID NO: 5965 - DNA, 23 bp, Homo sapiens
  source 1..23: mol_type = genomic DNA
gcgggcgccgtgggtggagcagg

SEQ ID NO: 5966 - DNA, 23 bp, Homo sapiens
  source 1..23: mol_type = genomic DNA
gcggggcacacttctacctgggg

SEQ ID NO: 5967 - DNA, 23 bp, Homo sapiens
  source 1..23: mol_type = genomic DNA
gcggggcggggcggggctcgggg

SEQ ID NO: 5968 - DNA, 23 bp, Homo sapiens
  source 1..23: mol_type = genomic DNA
gcggggcggggctcgggggacgg

SEQ ID NO: 5969 - DNA, 23 bp, Homo sapiens
  source 1..23: mol_type = genomic DNA
gcggggggggtggggtggggagg

SEQ ID NO: 5970 - DNA, 23 bp, Homo sapiens
  source 1..23: mol_type = genomic DNA
gcgggtcccgcggcctcaggggg

SEQ ID NO: 5971 - DNA, 23 bp, Homo sapiens
  source 1..23: mol_type = genomic DNA
gcgggtgagtgcggggtcgtggg

SEQ ID NO: 5972 - DNA, 23 bp, Homo sapiens
  source 1..23: mol_type = genomic DNA
gcgggttgggcggggcggggcgg

SEQ ID NO: 5973 - DNA, 23 bp, Homo sapiens
  source 1..23: mol_type = genomic DNA
gcgggttggtcagggcggggcgg

SEQ ID NO: 5974 - DNA, 23 bp, Homo sapiens
  source 1..23: mol_type = genomic DNA
gcgggttggtcggggcggggcgg

SEQ ID NO: 5975 - DNA, 23 bp, Homo sapiens
  source 1..23: mol_type = genomic DNA
gcgtcctgggggggtctgtcagg

SEQ ID NO: 5976 - DNA, 23 bp, Homo sapiens
  source 1..23: mol_type = genomic DNA
gcgtctccttcccattcttcagg

SEQ ID NO: 5977 - DNA, 23 bp, Homo sapiens
  source 1..23: mol_type = genomic DNA
gcgtctccttcccgttctccagg

SEQ ID NO: 5978 - DNA, 23 bp, Homo sapiens
  source 1..23: mol_type = genomic DNA
gcgtctccttcccgttcttcagg

SEQ ID NO: 5979 - DNA, 23 bp, Homo sapiens
  source 1..23: mol_type = genomic DNA
gcgtctgtggtggtgccttctgg

SEQ ID NO: 5980 - DNA, 23 bp, Homo sapiens
  source 1..23: mol_type = genomic DNA
gcgtcttcttcccgttctccagg

SEQ ID NO: 5981 - DNA, 23 bp, Homo sapiens
  source 1..23: mol_type = genomic DNA
gcgtcttcttcctgttctccagg

SEQ ID NO: 5982 - DNA, 23 bp, Homo sapiens
  source 1..23: mol_type = genomic DNA
gcgtcttgggggcgtctgtcagg

SEQ ID NO: 5983 - DNA, 23 bp, Homo sapiens
  source 1..23: mol_type = genomic DNA
gcgtcttgggggggtctgtcagg

SEQ ID NO: 5984 - DNA, 23 bp, Homo sapiens
  source 1..23: mol_type = genomic DNA
gcgtgggaagagggtcatggtgg

SEQ ID NO: 5985 - DNA, 23 bp, Homo sapiens
  source 1..23: mol_type = genomic DNA
gcgtgtccttcccgttctccagg

SEQ ID NO: 5986 - DNA, 23 bp, Homo sapiens
  source 1..23: mol_type = genomic DNA
gcgtttccttcccgttctccagg

SEQ ID NO: 5987 - DNA, 23 bp, Homo sapiens
  source 1..23: mol_type = genomic DNA
gcgttttgggggcgtctgtcagg

SEQ ID NO: 5988 - DNA, 23 bp, Homo sapiens
  source 1..23: mol_type = genomic DNA
gctaaggacagaccttaggaggg

SEQ ID NO: 5989 - DNA, 23 bp, Homo sapiens
  source 1..23: mol_type = genomic DNA
gctatggggtttctttccattgg

SEQ ID NO: 5990 - DNA, 23 bp, Homo sapiens
  source 1..23: mol_type = genomic DNA
gctatggggtttctttgcattgg

SEQ ID NO: 5991 - DNA, 23 bp, Homo sapiens
  source 1..23: mol_type = genomic DNA
gctatggggtttctttgcgttgg

SEQ ID NO: 5992 - DNA, 23 bp, Homo sapiens
  source 1..23: mol_type = genomic DNA
gctcagggcccagcacctcaggg

SEQ ID NO: 5993 - DNA, 23 bp, Homo sapiens
  source 1..23: mol_type = genomic DNA
gctcaggtagggaaggggtgagg

SEQ ID NO: 5994 - DNA, 23 bp, Homo sapiens
  source 1..23: mol_type = genomic DNA
gctccctccttttccacctgtgg

SEQ ID NO: 5995 - DNA, 23 bp, Homo sapiens
  source 1..23: mol_type = genomic DNA
gctccctccttttctaactgtgg

SEQ ID NO: 5996 - DNA, 23 bp, Homo sapiens
  source 1..23: mol_type = genomic DNA
gctccctccttttctatctgtgg

SEQ ID NO: 5997 - DNA, 23 bp, Homo sapiens
  source 1..23: mol_type = genomic DNA
gctcctttctggtagctcacagg

SEQ ID NO: 5998 - DNA, 23 bp, Homo sapiens
  source 1..23: mol_type = genomic DNA
gctcctttctggtatctcacagg

SEQ ID NO: 5999 - DNA, 23 bp, Homo sapiens
  source 1..23: mol_type = genomic DNA
gctctcgccggtcgagggtctgg

SEQ ID NO: 6000 - DNA, 23 bp, Homo sapiens
  source 1..23: mol_type = genomic DNA
gctctcgccggtcgagggtttgg

SEQ ID NO: 6001 - DNA, 23 bp, Homo sapiens
  source 1..23: mol_type = genomic DNA
gctctctccggccgagggtctgg

SEQ ID NO: 6002 - DNA, 23 bp, Homo sapiens
  source 1..23: mol_type = genomic DNA
gctctctccggtcgagggtctgg

SEQ ID NO: 6003 - DNA, 23 bp, Homo sapiens
  source 1..23: mol_type = genomic DNA
gctctgaccaggtcctgttttgg

SEQ ID NO: 6004 - DNA, 23 bp, Homo sapiens
  source 1..23: mol_type = genomic DNA
gctcttcctcctccacatcacgg

SEQ ID NO: 6005 - DNA, 23 bp, Homo sapiens
  source 1..23: mol_type = genomic DNA
gctcttcttcctccacatcacgg

SEQ ID NO: 6006 - DNA, 23 bp, Homo sapiens
  source 1..23: mol_type = genomic DNA
gctgaagaactcagaaaagctgg

SEQ ID NO: 6007 - DNA, 23 bp, Homo sapiens
  source 1..23: mol_type = genomic DNA
gctgaaggactcagaagtgctgg

SEQ ID NO: 6008 - DNA, 23 bp, Homo sapiens
  source 1..23: mol_type = genomic DNA
gctgagagactcagaagtgctgg

SEQ ID NO: 6009 - DNA, 23 bp, Homo sapiens
  source 1..23: mol_type = genomic DNA
gctgagggactcagaagtgctgg

SEQ ID NO: 6010 - DNA, 23 bp, Homo sapiens
  source 1..23: mol_type = genomic DNA
gctgcaagtaagtatgaaggagg

SEQ ID NO: 6011 - DNA, 23 bp, Homo sapiens
  source 1..23: mol_type = genomic DNA
gctgcagcgcacgggtaccaggg

SEQ ID NO: 6012 - DNA, 23 bp, Homo sapiens
  source 1..23: mol_type = genomic DNA
gctgcagcgcacgggtaccgggg

SEQ ID NO: 6013 - DNA, 23 bp, Homo sapiens
  source 1..23: mol_type = genomic DNA
gctgcagcgcgcaggtaccaggg

SEQ ID NO: 6014 - DNA, 23 bp, Homo sapiens
  source 1..23: mol_type = genomic DNA
gctgcagcgcgcgggtaccaggg

SEQ ID NO: 6015 - DNA, 23 bp, Homo sapiens
  source 1..23: mol_type = genomic DNA
gctgcaggactcagaaaagctgg

SEQ ID NO: 6016 - DNA, 23 bp, Homo sapiens
  source 1..23: mol_type = genomic DNA
gctgccacgtggggtcggacggg

SEQ ID NO: 6017 - DNA, 23 bp, Homo sapiens
  source 1..23: mol_type = genomic DNA
gctgcgacctggggccccacggg

SEQ ID NO: 6018 - DNA, 23 bp, Homo sapiens
  source 1..23: mol_type = genomic DNA
gctgcgacctggggcccgacggg

SEQ ID NO: 6019 - DNA, 23 bp, Homo sapiens
  source 1..23: mol_type = genomic DNA
gctgcgacctggggccggacggg

SEQ ID NO: 6020 - DNA, 23 bp, Homo sapiens
  source 1..23: mol_type = genomic DNA
gctgcgacgtggggcccgacggg

SEQ ID NO: 6021 - DNA, 23 bp, Homo sapiens
  source 1..23: mol_type = genomic DNA
gctgcgacgtggggccggacggg

SEQ ID NO: 6022 - DNA, 23 bp, Homo sapiens
  source 1..23: mol_type = genomic DNA
gctgcgacgtggggtcggacggg

SEQ ID NO: 6023 - DNA, 23 bp, Homo sapiens
  source 1..23: mol_type = genomic DNA
gctgcgacgtggggtcggactgg

SEQ ID NO: 6024 - DNA, 23 bp, Homo sapiens
  source 1..23: mol_type = genomic DNA
gctggagcgcgcgggtaccaggg

SEQ ID NO: 6025 - DNA, 23 bp, Homo sapiens
  source 1..23: mol_type = genomic DNA
gctggagcgcgctggtaccaggg

SEQ ID NO: 6026 - DNA, 23 bp, Homo sapiens
  source 1..23: mol_type = genomic DNA
gctggggtaaggaggggaatggg

SEQ ID NO: 6027 - DNA, 23 bp, Homo sapiens
  source 1..23: mol_type = genomic DNA
gctgggtaggcccataattgtgg

SEQ ID NO: 6028 - DNA, 23 bp, Homo sapiens
  source 1..23: mol_type = genomic DNA
gctgggtaggcccatgattgtgg

SEQ ID NO: 6029 - DNA, 23 bp, Homo sapiens
  source 1..23: mol_type = genomic DNA
gctgggtaggctcataattgtgg

SEQ ID NO: 6030 - DNA, 23 bp, Homo sapiens
  source 1..23: mol_type = genomic DNA
gctgggtcagggctgaggcttgg

SEQ ID NO: 6031 - DNA, 23 bp, Homo sapiens
  source 1..23: mol_type = genomic DNA
gctgggtcggcccatgattgtgg

SEQ ID NO: 6032 - DNA, 23 bp, Homo sapiens
  source 1..23: mol_type = genomic DNA
gctgggtgggcccatgattgtgg

SEQ ID NO: 6033 - DNA, 23 bp, Homo sapiens
  source 1..23: mol_type = genomic DNA
gctgtgtcccggcccagccgcgg

SEQ ID NO: 6034 - DNA, 23 bp, Homo sapiens
  source 1..23: mol_type = genomic DNA
gctgtgtcccggcccggccgcgg

SEQ ID NO: 6035 - DNA, 23 bp, Homo sapiens
  source 1..23: mol_type = genomic DNA
gcttcacactcaatatgtgtggg

SEQ ID NO: 6036 - DNA, 23 bp, Homo sapiens
  source 1..23: mol_type = genomic DNA
gcttcacactcaatgtgtgtggg

SEQ ID NO: 6037 - DNA, 23 bp, Homo sapiens
  source 1..23: mol_type = genomic DNA
gcttgaaaaggtgagattcttgg

SEQ ID NO: 6038 - DNA, 23 bp, Homo sapiens
  source 1..23: mol_type = genomic DNA
gcttgtaaaggtgagattctggg

SEQ ID NO: 6039 - DNA, 23 bp, Homo sapiens
  source 1..23: mol_type = genomic DNA
gcttgtacttctgtgtctcccgg

SEQ ID NO: 6040 - DNA, 23 bp, Homo sapiens
  source 1..23: mol_type = genomic DNA
gcttgtagttctgtgtctcccgg

SEQ ID NO: 6041 - DNA, 23 bp, Homo sapiens
  source 1..23: mol_type = genomic DNA
gcttgtccttcccgttctccagg

SEQ ID NO: 6042 - DNA, 23 bp, Homo sapiens
  source 1..23: mol_type = genomic DNA
ggaaaagaggagaaggtgagggg

SEQ ID NO: 6043 - DNA, 23 bp, Homo sapiens
  source 1..23: mol_type = genomic DNA
ggaaaagaggggaaggtgagggg

SEQ ID NO: 6044 - DNA, 23 bp, Homo sapiens
  source 1..23: mol_type = genomic DNA
ggaaacttctctggggtccaagg

SEQ ID NO: 6045 - DNA, 23 bp, Homo sapiens
  source 1..23: mol_type = genomic DNA
ggaaaggaagggaagatgagggg

SEQ ID NO: 6046 - DNA, 23 bp, Homo sapiens
  source 1..23: mol_type = genomic DNA
ggaaaggaggagaaggtgagggg

SEQ ID NO: 6047 - DNA, 23 bp, Homo sapiens
  source 1..23: mol_type = genomic DNA
ggaaaggaggggaagacgagggg

SEQ ID NO: 6048 - DNA, 23 bp, Homo sapiens
  source 1..23: mol_type = genomic DNA
ggaaaggaggggaagatgagggg

SEQ ID NO: 6049 - DNA, 23 bp, Homo sapiens
  source 1..23: mol_type = genomic DNA
ggaaaggaggggaaggtgagggg

SEQ ID NO: 6050 - DNA, 23 bp, Homo sapiens
  source 1..23: mol_type = genomic DNA
ggaaagttcgagtctctgagcgg

SEQ ID NO: 6051 - DNA, 23 bp, Homo sapiens
  source 1..23: mol_type = genomic DNA
ggaaagttcgagtctctgagtgg

SEQ ID NO: 6052 - DNA, 23 bp, Homo sapiens
  source 1..23: mol_type = genomic DNA
ggaacagctcaggtggagaaggg

SEQ ID NO: 6053 - DNA, 23 bp, Homo sapiens
  source 1..23: mol_type = genomic DNA
ggaaccgtgactttcctctcagg

SEQ ID NO: 6054 - DNA, 23 bp, Homo sapiens
  source 1..23: mol_type = genomic DNA
ggaacctcagagtcactctctgg

SEQ ID NO: 6055 - DNA, 23 bp, Homo sapiens
  source 1..23: mol_type = genomic DNA
ggaagaaaatgccctatgagggg

SEQ ID NO: 6056 - DNA, 23 bp, Homo sapiens
  source 1..23: mol_type = genomic DNA
ggaagaaaatgccctgtgagggg

SEQ ID NO: 6057 - DNA, 23 bp, Homo sapiens
  source 1..23: mol_type = genomic DNA
ggaagaaaatgtcctgtgagggg

SEQ ID NO: 6058 - DNA, 23 bp, Homo sapiens
  source 1..23: mol_type = genomic DNA
ggaagaagaagtgaaactcaggg

SEQ ID NO: 6059 - DNA, 23 bp, Homo sapiens
  source 1..23: mol_type = genomic DNA
ggaagagctcaggtagggaaggg

SEQ ID NO: 6060 - DNA, 23 bp, Homo sapiens
  source 1..23: mol_type = genomic DNA
ggaagagctcaggtggagaaggg

SEQ ID NO: 6061 - DNA, 23 bp, Homo sapiens
  source 1..23: mol_type = genomic DNA
ggaagagctcaggtggggaaggg

SEQ ID NO: 6062 - DNA, 23 bp, Homo sapiens
  source 1..23: mol_type = genomic DNA
ggaagagttcaggtagggaaggg

SEQ ID NO: 6063 - DNA, 23 bp, Homo sapiens
  source 1..23: mol_type = genomic DNA
ggaagcaccacccacaatcatgg

SEQ ID NO: 6064 - DNA, 23 bp, Homo sapiens
  source 1..23: mol_type = genomic DNA
ggaagcaccacccacaattatgg

SEQ ID NO: 6065 - DNA, 23 bp, Homo sapiens
  source 1..23: mol_type = genomic DNA
ggaagcaccatccacaatcatgg

SEQ ID NO: 6066 - DNA, 23 bp, Homo sapiens
  source 1..23: mol_type = genomic DNA
ggaagcaccatccacaattatgg

SEQ ID NO: 6067 - DNA, 23 bp, Homo sapiens
  source 1..23: mol_type = genomic DNA
ggaagcaccgtccacaatcatgg

SEQ ID NO: 6068 - DNA, 23 bp, Homo sapiens
  source 1..23: mol_type = genomic DNA
ggaagcaccttccacaatcatgg

SEQ ID NO: 6069 - DNA, 23 bp, Homo sapiens
  source 1..23: mol_type = genomic DNA
ggaagcgcccgtcgggccccagg

SEQ ID NO: 6070 - DNA, 23 bp, Homo sapiens
  source 1..23: mol_type = genomic DNA
ggaaggagccgcgggcgccatgg

SEQ ID NO: 6071 - DNA, 23 bp, Homo sapiens
  source 1..23: mol_type = genomic DNA
ggaaggcgccccgtggcccctgg

SEQ ID NO: 6072 - DNA, 23 bp, Homo sapiens
  source 1..23: mol_type = genomic DNA
ggaaggctccccactgcccctgg

SEQ ID NO: 6073 - DNA, 23 bp, Homo sapiens
  source 1..23: mol_type = genomic DNA
ggaagtgtagaaatacctcatgg

SEQ ID NO: 6074 - DNA, 23 bp, Homo sapiens
  source 1..23: mol_type = genomic DNA
ggacaagaggaattatggggtgg

SEQ ID NO: 6075 - DNA, 23 bp, Homo sapiens
  source 1..23: mol_type = genomic DNA
ggacacctggggtagggaagggg

SEQ ID NO: 6076 - DNA, 23 bp, Homo sapiens
  source 1..23: mol_type = genomic DNA
ggacacctggggtggggaagggg

SEQ ID NO: 6077 - DNA, 23 bp, Homo sapiens
  source 1..23: mol_type = genomic DNA
ggacacctggtgtggggaagggg

SEQ ID NO: 6078 - DNA, 23 bp, Homo sapiens
  source 1..23: mol_type = genomic DNA
ggacagatgtatcgccttgatgg

SEQ ID NO: 6079 - DNA, 23 bp, Homo sapiens
  source 1..23: mol_type = genomic DNA
ggacaggaggaattagggggtgg

SEQ ID NO: 6080 - DNA, 23 bp, Homo sapiens
  source 1..23: mol_type = genomic DNA
ggacaggaggaattatggggtgg

SEQ ID NO: 6081 - DNA, 23 bp, Homo sapiens
  source 1..23: mol_type = genomic DNA
ggacattttcttcccacaggtgg

SEQ ID NO: 6082 - DNA, 23 bp, Homo sapiens
  source 1..23: mol_type = genomic DNA
ggaccccgagacccttgacccgg

SEQ ID NO: 6083 - DNA, 23 bp, Homo sapiens
  source 1..23: mol_type = genomic DNA
ggaccccgagacccttgccccgg

SEQ ID NO: 6084 - DNA, 23 bp, Homo sapiens
  source 1..23: mol_type = genomic DNA
ggacccctgatcactatcctagg

SEQ ID NO: 6085 - DNA, 23 bp, Homo sapiens
  source 1..23: mol_type = genomic DNA
ggacccctgatcagtattccagg

SEQ ID NO: 6086 - DNA, 23 bp, Homo sapiens
  source 1..23: mol_type = genomic DNA
ggacccctgatcagtattctagg

SEQ ID NO: 6087 - DNA, 23 bp, Homo sapiens
  source 1..23: mol_type = genomic DNA
ggaccctcctgctctatccacgg

SEQ ID NO: 6088 - DNA, 23 bp, Homo sapiens
  source 1..23: mol_type = genomic DNA
ggaccggtgagtgcggggttggg

SEQ ID NO: 6089 - DNA, 23 bp, Homo sapiens
  source 1..23: mol_type = genomic DNA
ggaccgtgacttttcctctcagg

SEQ ID NO: 6090 - DNA, 23 bp, Homo sapiens
  source 1..23: mol_type = genomic DNA
ggacctgagctcctggaccgcgg

SEQ ID NO: 6091 - DNA, 23 bp, Homo sapiens
  source 1..23: mol_type = genomic DNA
ggacctgcgctcctggaccgcgg

SEQ ID NO: 6092 - DNA, 23 bp, Homo sapiens
  source 1..23: mol_type = genomic DNA
ggacggagccccgggcgccatgg

SEQ ID NO: 6093 - DNA, 23 bp, Homo sapiens
  source 1..23: mol_type = genomic DNA
ggacggagccccgggcgccgtgg

SEQ ID NO: 6094 - DNA, 23 bp, Homo sapiens
  source 1..23: mol_type = genomic DNA
ggacggatgtatcacctcgatgg

SEQ ID NO: 6095 - DNA, 23 bp, Homo sapiens
  source 1..23: mol_type = genomic DNA
ggacggatgtatcaccttgatgg

SEQ ID NO: 6096 - DNA, 23 bp, Homo sapiens
  source 1..23: mol_type = genomic DNA
ggacggatgtatcaccttggtgg

SEQ ID NO: 6097 - DNA, 23 bp, Homo sapiens
  source 1..23: mol_type = genomic DNA
ggacggatgtatcgccttgatgg

SEQ ID NO: 6098 - DNA, 23 bp, Homo sapiens
  source 1..23: mol_type = genomic DNA
ggacgggctccgcagatacctgg

SEQ ID NO: 6099 - DNA, 23 bp, Homo sapiens
  source 1..23: mol_type = genomic DNA
ggacgggctgaccacgggggcgg

SEQ ID NO: 6100 - DNA, 23 bp, Homo sapiens
  source 1..23: mol_type = genomic DNA
ggacgtttcgagtgtgtggtggg

SEQ ID NO: 6101 - DNA, 23 bp, Homo sapiens
  source 1..23: mol_type = genomic DNA
ggactcccgagagcagcaggagg

SEQ ID NO: 6102 - DNA, 23 bp, Homo sapiens
  source 1..23: mol_type = genomic DNA
ggactccgagacccttgtcccgg

SEQ ID NO: 6103 - DNA, 23 bp, Homo sapiens
  source 1..23: mol_type = genomic DNA
ggacttcagaaccgggactgcgg

SEQ ID NO: 6104 - DNA, 23 bp, Homo sapiens
  source 1..23: mol_type = genomic DNA
ggactttagaaccgggactgcgg

SEQ ID NO: 6105 - DNA, 23 bp, Homo sapiens
  source 1..23: mol_type = genomic DNA
ggactttagaactgggaccacgg

SEQ ID NO: 6106 - DNA, 23 bp, Homo sapiens
  source 1..23: mol_type = genomic DNA
ggactttagaactgggaccccgg

SEQ ID NO: 6107 - DNA, 23 bp, Homo sapiens
  source 1..23: mol_type = genomic DNA
ggactttagaactgggaccgcgg

SEQ ID NO: 6108 - DNA, 23 bp, Homo sapiens
  source 1..23: mol_type = genomic DNA
ggagaaatacctcatggagtggg

SEQ ID NO: 6109 - DNA, 23 bp, Homo sapiens
  source 1..23: mol_type = genomic DNA
ggagaaatacctcatggattggg

SEQ ID NO: 6110 - DNA, 23 bp, Homo sapiens
  source 1..23: mol_type = genomic DNA
ggagaacgggaaggacaagctgg

SEQ ID NO: 6111 - DNA, 23 bp, Homo sapiens
  source 1..23: mol_type = genomic DNA
ggagaacgggaaggacacgctgg

SEQ ID NO: 6112 - DNA, 23 bp, Homo sapiens
  source 1..23: mol_type = genomic DNA
ggagaagaagtgaaactcagggg

SEQ ID NO: 6113 - DNA, 23 bp, Homo sapiens
  source 1..23: mol_type = genomic DNA
ggagaagaagtgaaactcgtggg

SEQ ID NO: 6114 - DNA, 23 bp, Homo sapiens
  source 1..23: mol_type = genomic DNA
ggagaagcaacgggcccgcctgg

SEQ ID NO: 6115 - DNA, 23 bp, Homo sapiens
  source 1..23: mol_type = genomic DNA
ggagaagcaaggggcccgcccgg

SEQ ID NO: 6116 - DNA, 23 bp, Homo sapiens
  source 1..23: mol_type = genomic DNA
ggagaagcaaggggcccgcctgg

SEQ ID NO: 6117 - DNA, 23 bp, Homo sapiens
  source 1..23: mol_type = genomic DNA
ggagaagcaaggggccctcctgg

SEQ ID NO: 6118 - DNA, 23 bp, Homo sapiens
  source 1..23: mol_type = genomic DNA
ggagaccctcatgctgcacatgg

SEQ ID NO: 6119 - DNA, 23 bp, Homo sapiens
  source 1..23: mol_type = genomic DNA
ggagacctttagcagggtcaggg

SEQ ID NO: 6120 - DNA, 23 bp, Homo sapiens
  source 1..23: mol_type = genomic DNA
ggagagaggggaccgcaggcggg

SEQ ID NO: 6121 - DNA, 23 bp, Homo sapiens
  source 1..23: mol_type = genomic DNA
ggagagcctacctggagggccgg

SEQ ID NO: 6122 - DNA, 23 bp, Homo sapiens
  source 1..23: mol_type = genomic DNA
ggagagtctacctggagggccgg

SEQ ID NO: 6123 - DNA, 23 bp, Homo sapiens
  source 1..23: mol_type = genomic DNA
ggagcaaggggaccgcaggcggg

SEQ ID NO: 6124 - DNA, 23 bp, Homo sapiens
  source 1..23: mol_type = genomic DNA
ggagcagcagagagcctacctgg

SEQ ID NO: 6125 - DNA, 23 bp, Homo sapiens
  source 1..23: mol_type = genomic DNA
ggagcagcggagagcctacctgg

SEQ ID NO: 6126 - DNA, 23 bp, Homo sapiens
  source 1..23: mol_type = genomic DNA
ggagcagcggagagtctacctgg

SEQ ID NO: 6127 - DNA, 23 bp, Homo sapiens
  source 1..23: mol_type = genomic DNA
ggagcagctgagaacctacctgg

SEQ ID NO: 6128 - DNA, 23 bp, Homo sapiens
  source 1..23: mol_type = genomic DNA
ggagcagctgagagcctacctgg

SEQ ID NO: 6129 - DNA, 23 bp, Homo sapiens
  source 1..23: mol_type = genomic DNA
ggagcaggacagagcctacctgg

SEQ ID NO: 6130 - DNA, 23 bp, Homo sapiens
  source 1..23: mol_type = genomic DNA
ggagcagtggagagcctacctgg

SEQ ID NO: 6131 - DNA, 23 bp, Homo sapiens
  source 1..23: mol_type = genomic DNA
ggagcagttgagagcctacctgg

SEQ ID NO: 6132 - DNA, 23 bp, Homo sapiens
  source 1..23: mol_type = genomic DNA
ggagccccacttcatcgcagtgg

SEQ ID NO: 6133 - DNA, 23 bp, Homo sapiens
  source 1..23: mol_type = genomic DNA
ggagccccgcttcatcaccgtgg

SEQ ID NO: 6134 - DNA, 23 bp, Homo sapiens
  source 1..23: mol_type = genomic DNA
ggagccccgcttcatcgcagtgg

SEQ ID NO: 6135 - DNA, 23 bp, Homo sapiens
  source 1..23: mol_type = genomic DNA
ggagccccgcttcatcgccgtgg

SEQ ID NO: 6136 - DNA, 23 bp, Homo sapiens
  source 1..23: mol_type = genomic DNA
ggagccccgcttcatctcagtgg

SEQ ID NO: 6137 - DNA, 23 bp, Homo sapiens
  source 1..23: mol_type = genomic DNA
ggagccccgcttcattgcagtgg

SEQ ID NO: 6138 - DNA, 23 bp, Homo sapiens
  source 1..23: mol_type = genomic DNA
ggagccccgggcgccgtgggtgg

SEQ ID NO: 6139 - DNA, 23 bp, Homo sapiens
  source 1..23: mol_type = genomic DNA
ggagcccctcaccctgagatggg

SEQ ID NO: 6140 - DNA, 23 bp, Homo sapiens
  source 1..23: mol_type = genomic DNA
ggagcccttcagcagggtcaggg

SEQ ID NO: 6141 - DNA, 23 bp, Homo sapiens
  source 1..23: mol_type = genomic DNA
ggagcccttcagccaggtcaggg

SEQ ID NO: 6142 - DNA, 23 bp, Homo sapiens
  source 1..23: mol_type = genomic DNA
ggagcccttcagccgggtcaggg

SEQ ID NO: 6143 - DNA, 23 bp, Homo sapiens
  source 1..23: mol_type = genomic DNA
ggagcccttcagctgggtcaggg

SEQ ID NO: 6144 - DNA, 23 bp, Homo sapiens
  source 1..23: mol_type = genomic DNA
ggagccgcgggagccgtgggtgg

SEQ ID NO: 6145 - DNA, 23 bp, Homo sapiens
  source 1..23: mol_type = genomic DNA
ggagccgcgggcgccgtgggtgg

SEQ ID NO: 6146 - DNA, 23 bp, Homo sapiens
  source 1..23: mol_type = genomic DNA
ggagccggagtattgggacgagg

SEQ ID NO: 6147 - DNA, 23 bp, Homo sapiens
  source 1..23: mol_type = genomic DNA
ggagccgtgggtggagcaggagg

SEQ ID NO: 6148 - DNA, 23 bp, Homo sapiens
  source 1..23: mol_type = genomic DNA
ggagcgaggggaccgcaggcggg

SEQ ID NO: 6149 - DNA, 23 bp, Homo sapiens
  source 1..23: mol_type = genomic DNA
ggagcgcagatcctcgttcaggg

SEQ ID NO: 6150 - DNA, 23 bp, Homo sapiens
  source 1..23: mol_type = genomic DNA
ggagcgcaggtcctcattcaggg

SEQ ID NO: 6151 - DNA, 23 bp, Homo sapiens
  source 1..23: mol_type = genomic DNA
ggagcgcaggtcctcgttcaggg

SEQ ID NO: 6152 - DNA, 23 bp, Homo sapiens
  source 1..23: mol_type = genomic DNA
ggagcgcaggtcctcgttctggg

SEQ ID NO: 6153 - DNA, 23 bp, Homo sapiens
  source 1..23: mol_type = genomic DNA
ggagctcaggtcctcgttcaggg

SEQ ID NO: 6154 - DNA, 23 bp, Homo sapiens
  source 1..23: mol_type = genomic DNA
ggagctgaagtggtcgggggtgg

SEQ ID NO: 6155 - DNA, 23 bp, Homo sapiens
  source 1..23: mol_type = genomic DNA
ggagctgaagtggtctggggtgg

SEQ ID NO: 6156 - DNA, 23 bp, Homo sapiens
  source 1..23: mol_type = genomic DNA
ggaggaattgtgaggtgggtggg

SEQ ID NO: 6157 - DNA, 23 bp, Homo sapiens
  source 1..23: mol_type = genomic DNA
ggaggaccagacccaggacacgg

SEQ ID NO: 6158 - DNA, 23 bp, Homo sapiens
  source 1..23: mol_type = genomic DNA
ggaggaggaagagctcaggtggg

SEQ ID NO: 6159 - DNA, 23 bp, Homo sapiens
  source 1..23: mol_type = genomic DNA
ggaggcgcccgtccggccccagg

SEQ ID NO: 6160 - DNA, 23 bp, Homo sapiens
  source 1..23: mol_type = genomic DNA
ggaggcgcccgtcgggccccagg

SEQ ID NO: 6161 - DNA, 23 bp, Homo sapiens
  source 1..23: mol_type = genomic DNA
ggaggcgcccgtggggccccagg

SEQ ID NO: 6162 - DNA, 23 bp, Homo sapiens
  source 1..23: mol_type = genomic DNA
ggagggaaaccgcctctgcgggg

SEQ ID NO: 6163 - DNA, 23 bp, Homo sapiens
  source 1..23: mol_type = genomic DNA
ggagggaaacggcctctgcgggg

SEQ ID NO: 6164 - DNA, 23 bp, Homo sapiens
  source 1..23: mol_type = genomic DNA
ggagggaaacggcctctgtgggg

SEQ ID NO: 6165 - DNA, 23 bp, Homo sapiens
  source 1..23: mol_type = genomic DNA
ggagggaaatggcctctgccggg

SEQ ID NO: 6166 - DNA, 23 bp, Homo sapiens
  source 1..23: mol_type = genomic DNA
ggagggaaatggcctctgtgggg

SEQ ID NO: 6167 - DNA, 23 bp, Homo sapiens
  source 1..23: mol_type = genomic DNA
ggagggagcacaggtcagcgtgg

SEQ ID NO: 6168 - DNA, 23 bp, Homo sapiens
  source 1..23: mol_type = genomic DNA
ggagggcgatattctagtgttgg

SEQ ID NO: 6169 - DNA, 23 bp, Homo sapiens
  source 1..23: mol_type = genomic DNA
ggagggtgatattctagtgttgg

SEQ ID NO: 6170 - DNA, 23 bp, Homo sapiens
  source 1..23: mol_type = genomic DNA
ggaggtgtagaaatacctcatgg

SEQ ID NO: 6171 - DNA, 23 bp, Homo sapiens
  source 1..23: mol_type = genomic DNA
ggaggtgtggaaatacctcatgg

SEQ ID NO: 6172 - DNA, 23 bp, Homo sapiens
  source 1..23: mol_type = genomic DNA
ggagtaaggagggggatgagggg

SEQ ID NO: 6173 - DNA, 23 bp, Homo sapiens
  source 1..23: mol_type = genomic DNA
ggagtcccgcggcttcggggtgg

SEQ ID NO: 6174 - DNA, 23 bp, Homo sapiens
  source 1..23: mol_type = genomic DNA
ggagtcgctccgcagatacctgg

SEQ ID NO: 6175 - DNA, 23 bp, Homo sapiens
  source 1..23: mol_type = genomic DNA
ggagtcgtgacctgcgccccagg

SEQ ID NO: 6176 - DNA, 23 bp, Homo sapiens
  source 1..23: mol_type = genomic DNA
ggagtcgtgacctgcgccccggg

SEQ ID NO: 6177 - DNA, 23 bp, Homo sapiens
  source 1..23: mol_type = genomic DNA
ggagtgagagcctggggacgagg

SEQ ID NO: 6178 - DNA, 23 bp, Homo sapiens
  source 1..23: mol_type = genomic DNA
ggagtggagaatccccaacgcgg

SEQ ID NO: 6179 - DNA, 23 bp, Homo sapiens
  source 1..23: mol_type = genomic DNA
ggagtggagaatcctcaacgcgg

SEQ ID NO: 6180 - DNA, 23 bp, Homo sapiens
  source 1..23: mol_type = genomic DNA
ggagtggctccgcagacacctgg

SEQ ID NO: 6181 - DNA, 23 bp, Homo sapiens
  source 1..23: mol_type = genomic DNA
ggagtggctccgcagatacctgg

SEQ ID NO: 6182 - DNA, 23 bp, Homo sapiens
  source 1..23: mol_type = genomic DNA
ggagtggctccgcggatacctgg

SEQ ID NO: 6183 - DNA, 23 bp, Homo sapiens
  source 1..23: mol_type = genomic DNA
ggagtgggagcctggggacgagg

SEQ ID NO: 6184 - DNA, 23 bp, Homo sapiens
  source 1..23: mol_type = genomic DNA
ggagtgggagcctgggggagagg

SEQ ID NO: 6185 - DNA, 23 bp, Homo sapiens
  source 1..23: mol_type = genomic DNA
ggagtgggagcctgggggccagg

SEQ ID NO: 6186 - DNA, 23 bp, Homo sapiens
  source 1..23: mol_type = genomic DNA
ggagtgggagcctgggggcgagg

SEQ ID NO: 6187 - DNA, 23 bp, Homo sapiens
  source 1..23: mol_type = genomic DNA
ggagtgggagcctgggggtgagg

SEQ ID NO: 6188 - DNA, 23 bp, Homo sapiens
  source 1..23: mol_type = genomic DNA
ggataatcttctattccctgagg

SEQ ID NO: 6189 - DNA, 23 bp, Homo sapiens
  source 1..23: mol_type = genomic DNA
ggatctcagacccggagactcgg

SEQ ID NO: 6190 - DNA, 23 bp, Homo sapiens
  source 1..23: mol_type = genomic DNA
ggatctcagaccgggagactcgg

SEQ ID NO: 6191 - DNA, 23 bp, Homo sapiens
  source 1..23: mol_type = genomic DNA
ggatctcagaccgggagacttgg

SEQ ID NO: 6192 - DNA, 23 bp, Homo sapiens
  source 1..23: mol_type = genomic DNA
ggatctcagacggggagactcgg

SEQ ID NO: 6193 - DNA, 23 bp, Homo sapiens
  source 1..23: mol_type = genomic DNA
ggatctcggacccggagactcgg

SEQ ID NO: 6194 - DNA, 23 bp, Homo sapiens
  source 1..23: mol_type = genomic DNA
ggatgaagtccctgaggaaatgg

SEQ ID NO: 6195 - DNA, 23 bp, Homo sapiens
  source 1..23: mol_type = genomic DNA
ggatgaagtccttgaggaaatgg

SEQ ID NO: 6196 - DNA, 23 bp, Homo sapiens
  source 1..23: mol_type = genomic DNA
ggatgaagtctctgaggaaatgg

SEQ ID NO: 6197 - DNA, 23 bp, Homo sapiens
  source 1..23: mol_type = genomic DNA
ggatgacgtctctgaggaaatgg

SEQ ID NO: 6198 - DNA, 23 bp, Homo sapiens
  source 1..23: mol_type = genomic DNA
ggatgatccaagaaatcactggg

SEQ ID NO: 6199 - DNA, 23 bp, Homo sapiens
  source 1..23: mol_type = genomic DNA
ggatggaaccttccagaagtggg

SEQ ID NO: 6200 - DNA, 23 bp, Homo sapiens
  source 1..23: mol_type = genomic DNA
ggatggagccgcgggcaccgtgg

SEQ ID NO: 6201 - DNA, 23 bp, Homo sapiens
  source 1..23: mol_type = genomic DNA
ggatggagccgcgggcgccgtgg

SEQ ID NO: 6202 - DNA, 23 bp, Homo sapiens
  source 1..23: mol_type = genomic DNA
ggatggatgtatcaccttgatgg

SEQ ID NO: 6203 - DNA, 23 bp, Homo sapiens
  source 1..23: mol_type = genomic DNA
ggatggcctcccacgagaagagg

SEQ ID NO: 6204 - DNA, 23 bp, Homo sapiens
  source 1..23: mol_type = genomic DNA
ggatggcctcccacgaggagggg

SEQ ID NO: 6205 - DNA, 23 bp, Homo sapiens
  source 1..23: mol_type = genomic DNA
ggatggccttccacgaggagggg

SEQ ID NO: 6206 - DNA, 23 bp, Homo sapiens
  source 1..23: mol_type = genomic DNA
ggatggcgaggaccaaactcagg

SEQ ID NO: 6207 - DNA, 23 bp, Homo sapiens
  source 1..23: mol_type = genomic DNA
ggatggcgccccgggcgccatgg

SEQ ID NO: 6208 - DNA, 23 bp, Homo sapiens
  source 1..23: mol_type = genomic DNA
ggatgggaccttccagaagtggg

SEQ ID NO: 6209 - DNA, 23 bp, Homo sapiens
  source 1..23: mol_type = genomic DNA
ggatggggaggaccaaactcagg

SEQ ID NO: 6210 - DNA, 23 bp, Homo sapiens
  source 1..23: mol_type = genomic DNA
ggatggggaggaccagacccagg

SEQ ID NO: 6211 - DNA, 23 bp, Homo sapiens
  source 1..23: mol_type = genomic DNA
ggatggtgcttccagtaacaagg

SEQ ID NO: 6212 - DNA, 23 bp, Homo sapiens
  source 1..23: mol_type = genomic DNA
ggatggtgcttccagtaacgagg

SEQ ID NO: 6213 - DNA, 23 bp, Homo sapiens
  source 1..23: mol_type = genomic DNA
ggatgtacggctgcgacctgggg

SEQ ID NO: 6214 - DNA, 23 bp, Homo sapiens
  source 1..23: mol_type = genomic DNA
ggatgtacggctgcgacgtgggg

SEQ ID NO: 6215 - DNA, 23 bp, Homo sapiens
  source 1..23: mol_type = genomic DNA
ggatgtatggctgcgacctgggg

SEQ ID NO: 6216 - DNA, 23 bp, Homo sapiens
  source 1..23: mol_type = genomic DNA
ggatgtatggctgcgacgtgggg

SEQ ID NO: 6217 - DNA, 23 bp, Homo sapiens
  source 1..23: mol_type = genomic DNA
ggatgtattgagcatgcaatggg

SEQ ID NO: 6218 - DNA, 23 bp, Homo sapiens
  source 1..23: mol_type = genomic DNA
ggatgtattgagcatgcgatggg

SEQ ID NO: 6219 - DNA, 23 bp, Homo sapiens
  source 1..23: mol_type = genomic DNA
ggatgtctggctgcgacctgggg

SEQ ID NO: 6220 - DNA, 23 bp, Homo sapiens
  source 1..23: mol_type = genomic DNA
ggatgtctggctgcgacgtgggg

SEQ ID NO: 6221 - DNA, 23 bp, Homo sapiens
  source 1..23: mol_type = genomic DNA
ggatgtgaagaaatacctcatgg

SEQ ID NO: 6222 - DNA, 23 bp, Homo sapiens
  source 1..23: mol_type = genomic DNA
ggatgtgaagaaatacttcatgg

SEQ ID NO: 6223 - DNA, 23 bp, Homo sapiens
  source 1..23: mol_type = genomic DNA
ggatgtggagaaatacctcatgg

SEQ ID NO: 6224 - DNA, 23 bp, Homo sapiens
  source 1..23: mol_type = genomic DNA
ggatgtggtgaaatacctcatgg

SEQ ID NO: 6225 - DNA, 23 bp, Homo sapiens
  source 1..23: mol_type = genomic DNA
ggatgtgtggctgcgacctgggg

SEQ ID NO: 6226 - DNA, 23 bp, Homo sapiens
  source 1..23: mol_type = genomic DNA
ggatgtgtggctgcgacgtgggg

SEQ ID NO: 6227 - DNA, 23 bp, Homo sapiens
  source 1..23: mol_type = genomic DNA
ggatgttacgcgtgtgtggtggg

SEQ ID NO: 6228 - DNA, 23 bp, Homo sapiens
  source 1..23: mol_type = genomic DNA
ggatgtttcgcgtgtgtcgtggg

SEQ ID NO: 6229 - DNA, 23 bp, Homo sapiens
  source 1..23: mol_type = genomic DNA
ggatgtttcgcgtgtgtgatggg

SEQ ID NO: 6230 - DNA, 23 bp, Homo sapiens
  source 1..23: mol_type = genomic DNA
ggatgtttcgcgtgtgtggtggg

SEQ ID NO: 6231 - DNA, 23 bp, Homo sapiens
  source 1..23: mol_type = genomic DNA
ggatgtttggctgcgacctgggg

SEQ ID NO: 6232 - DNA, 23 bp, Homo sapiens
  source 1..23: mol_type = genomic DNA
ggatgtttggctgcgacgtgggg

SEQ ID NO: 6233 - DNA, 23 bp, Homo sapiens
  source 1..23: mol_type = genomic DNA
ggattacatcgcccagaacgagg

SEQ ID NO: 6234 - DNA, 23 bp, Homo sapiens
  source 1..23: mol_type = genomic DNA
ggattacatcgccctgaaagagg

SEQ ID NO: 6235 - DNA, 23 bp, Homo sapiens
  source 1..23: mol_type = genomic DNA
ggattacatcgccctgaacgagg

SEQ ID NO: 6236 - DNA, 23 bp, Homo sapiens
  source 1..23: mol_type = genomic DNA
ggattacatcgccctgaatgagg

SEQ ID NO: 6237 - DNA, 23 bp, Homo sapiens
  source 1..23: mol_type = genomic DNA
ggattacatcgccttgaacgagg

SEQ ID NO: 6238 - DNA, 23 bp, Homo sapiens
  source 1..23: mol_type = genomic DNA
ggattgggagcctggggacgagg

SEQ ID NO: 6239 - DNA, 23 bp, Homo sapiens
  source 1..23: mol_type = genomic DNA
ggattggggagtcacagccttgg

SEQ ID NO: 6240 - DNA, 23 bp, Homo sapiens
  source 1..23: mol_type = genomic DNA
ggattggggagtcccagccttgg

SEQ ID NO: 6241 - DNA, 23 bp, Homo sapiens
  source 1..23: mol_type = genomic DNA
ggcacacagggtcccaggctggg

SEQ ID NO: 6242 - DNA, 23 bp, Homo sapiens
  source 1..23: mol_type = genomic DNA
ggcaccgtggatagagcaggagg

SEQ ID NO: 6243 - DNA, 23 bp, Homo sapiens
  source 1..23: mol_type = genomic DNA
ggcagagaacaaggcctgagagg

SEQ ID NO: 6244 - DNA, 23 bp, Homo sapiens
  source 1..23: mol_type = genomic DNA
ggcagggaaatggcctctgtagg

SEQ ID NO: 6245 - DNA, 23 bp, Homo sapiens
  source 1..23: mol_type = genomic DNA
ggcagggaaatggcctctgtggg

SEQ ID NO: 6246 - DNA, 23 bp, Homo sapiens
  source 1..23: mol_type = genomic DNA
ggcagggaacacttctacctggg

SEQ ID NO: 6247 - DNA, 23 bp, Homo sapiens
  source 1..23: mol_type = genomic DNA
ggcagggcacacttctacctggg

SEQ ID NO: 6248 - DNA, 23 bp, Homo sapiens
  source 1..23: mol_type = genomic DNA
ggcagggccatgcaatcttaggg

SEQ ID NO: 6249 - DNA, 23 bp, Homo sapiens
  source 1..23: mol_type = genomic DNA
ggcagggccatgcgatcttaggg

SEQ ID NO: 6250 - DNA, 23 bp, Homo sapiens
  source 1..23: mol_type = genomic DNA
ggcagggccatgtgatcttaggg

SEQ ID NO: 6251 - DNA, 23 bp, Homo sapiens
  source 1..23: mol_type = genomic DNA
ggcaggtctgggggtgggtgggg

SEQ ID NO: 6252 - DNA, 23 bp, Homo sapiens
  source 1..23: mol_type = genomic DNA
ggcatggcctcccacgaggaggg

SEQ ID NO: 6253 - DNA, 23 bp, Homo sapiens
  source 1..23: mol_type = genomic DNA
ggccaaaaatccccccaggttgg

SEQ ID NO: 6254 - DNA, 23 bp, Homo sapiens
  source 1..23: mol_type = genomic DNA
ggccaaaaatccccccgggtggg

SEQ ID NO: 6255 - DNA, 23 bp, Homo sapiens
  source 1..23: mol_type = genomic DNA
ggccaaaaatccccccgggttgg

SEQ ID NO: 6256 - DNA, 23 bp, Homo sapiens
  source 1..23: mol_type = genomic DNA
ggccaaaaattcccccgggttgg

SEQ ID NO: 6257 - DNA, 23 bp, Homo sapiens
  source 1..23: mol_type = genomic DNA
ggccaaaatccccgcgggttggg

SEQ ID NO: 6258 - DNA, 23 bp, Homo sapiens
  source 1..23: mol_type = genomic DNA
ggccacctggcccgtccgtgggg

SEQ ID NO: 6259 - DNA, 23 bp, Homo sapiens
  source 1..23: mol_type = genomic DNA
ggccagcccgggagacctacagg

SEQ ID NO: 6260 - DNA, 23 bp, Homo sapiens
  source 1..23: mol_type = genomic DNA
ggccagcccgggagatctacagg

SEQ ID NO: 6261 - DNA, 23 bp, Homo sapiens
  source 1..23: mol_type = genomic DNA
ggccagcccgggagatctatagg

SEQ ID NO: 6262 - DNA, 23 bp, Homo sapiens
  source 1..23: mol_type = genomic DNA
ggccatccccggcgacctatagg

SEQ ID NO: 6263 - DNA, 23 bp, Homo sapiens
  source 1..23: mol_type = genomic DNA
ggccatcccgggagatctacagg

SEQ ID NO: 6264 - DNA, 23 bp, Homo sapiens
  source 1..23: mol_type = genomic DNA
ggccatcccgggagatctacggg

SEQ ID NO: 6265 - DNA, 23 bp, Homo sapiens
  source 1..23: mol_type = genomic DNA
ggccatcccgggagatctatagg

SEQ ID NO: 6266 - DNA, 23 bp, Homo sapiens
  source 1..23: mol_type = genomic DNA
ggccatgccgggagatctacggg

SEQ ID NO: 6267 - DNA, 23 bp, Homo sapiens
  source 1..23: mol_type = genomic DNA
ggccccaggcgtggctctcaggg

SEQ ID NO: 6268 - DNA, 23 bp, Homo sapiens
  source 1..23: mol_type = genomic DNA
ggccccgggcggggctctcaggg

SEQ ID NO: 6269 - DNA, 23 bp, Homo sapiens
  source 1..23: mol_type = genomic DNA
ggcccctcctgctccacccacgg

SEQ ID NO: 6270 - DNA, 23 bp, Homo sapiens
  source 1..23: mol_type = genomic DNA
ggcccctcctgctctatccacgg

SEQ ID NO: 6271 - DNA, 23 bp, Homo sapiens
  source 1..23: mol_type = genomic DNA
ggcccctcctgctctatccatgg

SEQ ID NO: 6272 - DNA, 23 bp, Homo sapiens
  source 1..23: mol_type = genomic DNA
ggcccctcttgctctatccacgg

SEQ ID NO: 6273 - DNA, 23 bp, Homo sapiens
  source 1..23: mol_type = genomic DNA
ggcccctcttgctctatccatgg

SEQ ID NO: 6274 - DNA, 23 bp, Homo sapiens
  source 1..23: mol_type = genomic DNA
ggcccgcccggcgagggcgcagg

SEQ ID NO: 6275 - DNA, 23 bp, Homo sapiens
  source 1..23: mol_type = genomic DNA
ggcccgcccggcggggacgcagg

SEQ ID NO: 6276 - DNA, 23 bp, Homo sapiens
  source 1..23: mol_type = genomic DNA
ggcccgcccggcgggggcgcagg

SEQ ID NO: 6277 - DNA, 23 bp, Homo sapiens
  source 1..23: mol_type = genomic DNA
ggcccgcctggcgggggcgcagg

SEQ ID NO: 6278 - DNA, 23 bp, Homo sapiens
  source 1..23: mol_type = genomic DNA
ggcccgtccgtaggggatgaggg

SEQ ID NO: 6279 - DNA, 23 bp, Homo sapiens
  source 1..23: mol_type = genomic DNA
ggcccgtccgtgggggatgaggg

SEQ ID NO: 6280 - DNA, 23 bp, Homo sapiens
  source 1..23: mol_type = genomic DNA
ggcccgtgacttttcctctcagg

SEQ ID NO: 6281 - DNA, 23 bp, Homo sapiens
  source 1..23: mol_type = genomic DNA
ggccctcccggcgagggcgcagg

SEQ ID NO: 6282 - DNA, 23 bp, Homo sapiens
  source 1..23: mol_type = genomic DNA
ggccctcctggcgggggcgcagg

SEQ ID NO: 6283 - DNA, 23 bp, Homo sapiens
  source 1..23: mol_type = genomic DNA
ggccctgacccagaccagggcgg

SEQ ID NO: 6284 - DNA, 23 bp, Homo sapiens
  source 1..23: mol_type = genomic DNA
ggccctgacccagacctgggcgg

SEQ ID NO: 6285 - DNA, 23 bp, Homo sapiens
  source 1..23: mol_type = genomic DNA
ggccctgagcttctaccctgcgg

SEQ ID NO: 6286 - DNA, 23 bp, Homo sapiens
  source 1..23: mol_type = genomic DNA
ggccctgggaaaggaggggaagg

SEQ ID NO: 6287 - DNA, 23 bp, Homo sapiens
  source 1..23: mol_type = genomic DNA
ggccctgggcttctaccctacgg

SEQ ID NO: 6288 - DNA, 23 bp, Homo sapiens
  source 1..23: mol_type = genomic DNA
ggccctgggcttctaccctgcgg

SEQ ID NO: 6289 - DNA, 23 bp, Homo sapiens
  source 1..23: mol_type = genomic DNA
ggccctgggcttctaccctgggg

SEQ ID NO: 6290 - DNA, 23 bp, Homo sapiens
  source 1..23: mol_type = genomic DNA
ggccctgggtttctaccctgcgg

SEQ ID NO: 6291 - DNA, 23 bp, Homo sapiens
  source 1..23: mol_type = genomic DNA
ggccgcctccaacttgcgctggg

SEQ ID NO: 6292 - DNA, 23 bp, Homo sapiens
  source 1..23: mol_type = genomic DNA
ggccgcctcccacttgagctggg

SEQ ID NO: 6293 - DNA, 23 bp, Homo sapiens
  source 1..23: mol_type = genomic DNA
ggccgcctcccacttgcgctggg

SEQ ID NO: 6294 - DNA, 23 bp, Homo sapiens
  source 1..23: mol_type = genomic DNA
ggccgcctcccacttgcgcttgg

SEQ ID NO: 6295 - DNA, 23 bp, Homo sapiens
  source 1..23: mol_type = genomic DNA
ggccgcctcccacttgtgcttgg

SEQ ID NO: 6296 - DNA, 23 bp, Homo sapiens
  source 1..23: mol_type = genomic DNA
ggccggtgagtgaccccgcccgg

SEQ ID NO: 6297 - DNA, 23 bp, Homo sapiens
  source 1..23: mol_type = genomic DNA
ggccggtgagtgaccccggccgg

SEQ ID NO: 6298 - DNA, 23 bp, Homo sapiens
  source 1..23: mol_type = genomic DNA
ggccgtctcccacttgcgctggg

SEQ ID NO: 6299 - DNA, 23 bp, Homo sapiens
  source 1..23: mol_type = genomic DNA
ggccgtctcccacttgtgcttgg

SEQ ID NO: 6300 - DNA, 23 bp, Homo sapiens
  source 1..23: mol_type = genomic DNA
ggcctcagggaggcggatctcgg

SEQ ID NO: 6301 - DNA, 23 bp, Homo sapiens
  source 1..23: mol_type = genomic DNA
ggcctcaggggggcggatctcgg

SEQ ID NO: 6302 - DNA, 23 bp, Homo sapiens
  source 1..23: mol_type = genomic DNA
ggcctcaggggggtggatctcgg

SEQ ID NO: 6303 - DNA, 23 bp, Homo sapiens
  source 1..23: mol_type = genomic DNA
ggcctcagggggtcggatctcgg

SEQ ID NO: 6304 - DNA, 23 bp, Homo sapiens
  source 1..23: mol_type = genomic DNA
ggcctcccgagagcagcaggagg

SEQ ID NO: 6305 - DNA, 23 bp, Homo sapiens
  source 1..23: mol_type = genomic DNA
ggcctctcctgctctatccacgg

SEQ ID NO: 6306 - DNA, 23 bp, Homo sapiens
  source 1..23: mol_type = genomic DNA
ggcctctgccgggaggagcgagg

SEQ ID NO: 6307 - DNA, 23 bp, Homo sapiens
  source 1..23: mol_type = genomic DNA
ggcctctgcggagaggaacgagg

SEQ ID NO: 6308 - DNA, 23 bp, Homo sapiens
  source 1..23: mol_type = genomic DNA
ggcctctgcggagaggagcgagg

SEQ ID NO: 6309 - DNA, 23 bp, Homo sapiens
  source 1..23: mol_type = genomic DNA
ggcctctgcggggagaagcaagg

SEQ ID NO: 6310 - DNA, 23 bp, Homo sapiens
  source 1..23: mol_type = genomic DNA
ggcctctggggagaggagcgagg

SEQ ID NO: 6311 - DNA, 23 bp, Homo sapiens
  source 1..23: mol_type = genomic DNA
ggcctctgtagggaggagcaagg

SEQ ID NO: 6312 - DNA, 23 bp, Homo sapiens
  source 1..23: mol_type = genomic DNA
ggcctctgtggggagaagcaagg

SEQ ID NO: 6313 - DNA, 23 bp, Homo sapiens
  source 1..23: mol_type = genomic DNA
ggcctctgtggggaggagagagg

SEQ ID NO: 6314 - DNA, 23 bp, Homo sapiens
  source 1..23: mol_type = genomic DNA
ggcctctgtggggaggagcgagg

SEQ ID NO: 6315 - DNA, 23 bp, Homo sapiens
  source 1..23: mol_type = genomic DNA
ggcctgagaggaaaagtcacggg

SEQ ID NO: 6316 - DNA, 23 bp, Homo sapiens
  source 1..23: mol_type = genomic DNA
ggcgacccggcccgtccgtgggg

SEQ ID NO: 6317 - DNA, 23 bp, Homo sapiens
  source 1..23: mol_type = genomic DNA
ggcgacccgggccgtacgtgggg

SEQ ID NO: 6318 - DNA, 23 bp, Homo sapiens
  source 1..23: mol_type = genomic DNA
ggcgacccgggccgtccgtgggg

SEQ ID NO: 6319 - DNA, 23 bp, Homo sapiens
  source 1..23: mol_type = genomic DNA
ggcgacctggcccgtccgtaggg

SEQ ID NO: 6320 - DNA, 23 bp, Homo sapiens
  source 1..23: mol_type = genomic DNA
ggcgacctggcccgtccgtgggg

SEQ ID NO: 6321 - DNA, 23 bp, Homo sapiens
  source 1..23: mol_type = genomic DNA
ggcgccatgacggccatcctcgg

SEQ ID NO: 6322 - DNA, 23 bp, Homo sapiens
  source 1..23: mol_type = genomic DNA
ggcgccatggatagagcaagagg

SEQ ID NO: 6323 - DNA, 23 bp, Homo sapiens
  source 1..23: mol_type = genomic DNA
ggcgccatggatagagcaggagg

SEQ ID NO: 6324 - DNA, 23 bp, Homo sapiens
  source 1..23: mol_type = genomic DNA
ggcgcccgcggctcccctctcgg

SEQ ID NO: 6325 - DNA, 23 bp, Homo sapiens
  source 1..23: mol_type = genomic DNA
ggcgcccgcggctcccctcttgg

SEQ ID NO: 6326 - DNA, 23 bp, Homo sapiens
  source 1..23: mol_type = genomic DNA
ggcgcccgcggctcctctctcgg

SEQ ID NO: 6327 - DNA, 23 bp, Homo sapiens
  source 1..23: mol_type = genomic DNA
ggcgcccgcggctccttcctcgg

SEQ ID NO: 6328 - DNA, 23 bp, Homo sapiens
  source 1..23: mol_type = genomic DNA
ggcgcccggggcgccatcctcgg

SEQ ID NO: 6329 - DNA, 23 bp, Homo sapiens
  source 1..23: mol_type = genomic DNA
ggcgcccggggctcccctctcgg

SEQ ID NO: 6330 - DNA, 23 bp, Homo sapiens
  source 1..23: mol_type = genomic DNA
ggcgcccggggctccgtcctcgg

SEQ ID NO: 6331 - DNA, 23 bp, Homo sapiens
  source 1..23: mol_type = genomic DNA
ggcgccgtggatagagcaagagg

SEQ ID NO: 6332 - DNA, 23 bp, Homo sapiens
  source 1..23: mol_type = genomic DNA
ggcgccgtggatagagcaggagg

SEQ ID NO: 6333 - DNA, 23 bp, Homo sapiens
  source 1..23: mol_type = genomic DNA
ggcgccgtgggtggagcaggagg

SEQ ID NO: 6334 - DNA, 23 bp, Homo sapiens
  source 1..23: mol_type = genomic DNA
ggcggcatgacggccatcctcgg

SEQ ID NO: 6335 - DNA, 23 bp, Homo sapiens
  source 1..23: mol_type = genomic DNA
ggcggcccgtgcggcggagcagg

SEQ ID NO: 6336 - DNA, 23 bp, Homo sapiens
  source 1..23: mol_type = genomic DNA
ggcggcccgtgtggcggagcagg

SEQ ID NO: 6337 - DNA, 23 bp, Homo sapiens
  source 1..23: mol_type = genomic DNA
ggcggggcacacttctacctggg

SEQ ID NO: 6338 - DNA, 23 bp, Homo sapiens
  source 1..23: mol_type = genomic DNA
ggcggggcggggcggggctcggg

SEQ ID NO: 6339 - DNA, 23 bp, Homo sapiens
  source 1..23: mol_type = genomic DNA
ggcggggctctcagggtctcagg

SEQ ID NO: 6340 - DNA, 23 bp, Homo sapiens
  source 1..23: mol_type = genomic DNA
ggcggggttctcagggtctcagg

SEQ ID NO: 6341 - DNA, 23 bp, Homo sapiens
  source 1..23: mol_type = genomic DNA
ggcgggtcccgcggcctcagggg

SEQ ID NO: 6342 - DNA, 23 bp, Homo sapiens
  source 1..23: mol_type = genomic DNA
ggcgggtcccgcggcctcggggg

SEQ ID NO: 6343 - DNA, 23 bp, Homo sapiens
  source 1..23: mol_type = genomic DNA
ggcgggtctggggcggggtgggg

SEQ ID NO: 6344 - DNA, 23 bp, Homo sapiens
  source 1..23: mol_type = genomic DNA
ggcgggtctgggggtgggtgggg

SEQ ID NO: 6345 - DNA, 23 bp, Homo sapiens
  source 1..23: mol_type = genomic DNA
ggcgggtgagtgcggggtcgtgg

SEQ ID NO: 6346 - DNA, 23 bp, Homo sapiens
  source 1..23: mol_type = genomic DNA
ggcggtgtagaaatacctcatgg

SEQ ID NO: 6347 - DNA, 23 bp, Homo sapiens
  source 1..23: mol_type = genomic DNA
ggcggtgtcgaaatacctcatgg

SEQ ID NO: 6348 - DNA, 23 bp, Homo sapiens
  source 1..23: mol_type = genomic DNA
ggcggtgtggaaatacctcatgg

SEQ ID NO: 6349 - DNA, 23 bp, Homo sapiens
  source 1..23: mol_type = genomic DNA
ggcgtggctctcagagtctcagg

SEQ ID NO: 6350 - DNA, 23 bp, Homo sapiens
  source 1..23: mol_type = genomic DNA
ggcgtggctctcagggtctcagg

SEQ ID NO: 6351 - DNA, 23 bp, Homo sapiens
  source 1..23: mol_type = genomic DNA
ggctcccgcggctcccctcttgg

SEQ ID NO: 6352 - DNA, 23 bp, Homo sapiens
  source 1..23: mol_type = genomic DNA
ggctcctcctgctctatccacgg

SEQ ID NO: 6353 - DNA, 23 bp, Homo sapiens
  source 1..23: mol_type = genomic DNA
ggctctgggaaaagaggagaagg

SEQ ID NO: 6354 - DNA, 23 bp, Homo sapiens
  source 1..23: mol_type = genomic DNA
ggctctgggaaaagaggggaagg

SEQ ID NO: 6355 - DNA, 23 bp, Homo sapiens
  source 1..23: mol_type = genomic DNA
ggctctgggaaaggaggagaagg

SEQ ID NO: 6356 - DNA, 23 bp, Homo sapiens
  source 1..23: mol_type = genomic DNA
ggctctgggaaaggaggggaagg

SEQ ID NO: 6357 - DNA, 23 bp, Homo sapiens
  source 1..23: mol_type = genomic DNA
ggctgatgcctgaggtccttggg

SEQ ID NO: 6358 - DNA, 23 bp, Homo sapiens
  source 1..23: mol_type = genomic DNA
ggctgccacgtggggtcggacgg

SEQ ID NO: 6359 - DNA, 23 bp, Homo sapiens
  source 1..23: mol_type = genomic DNA
ggctgcgacctggggccccacgg

SEQ ID NO: 6360 - DNA, 23 bp, Homo sapiens
  source 1..23: mol_type = genomic DNA
ggctgcgacctggggcccgacgg

SEQ ID NO: 6361 - DNA, 23 bp, Homo sapiens
  source 1..23: mol_type = genomic DNA
ggctgcgacctggggccggacgg

SEQ ID NO: 6362 - DNA, 23 bp, Homo sapiens
  source 1..23: mol_type = genomic DNA
ggctgcgacgtggggcccgacgg

SEQ ID NO: 6363 - DNA, 23 bp, Homo sapiens
  source 1..23: mol_type = genomic DNA
ggctgcgacgtggggccggacgg

SEQ ID NO: 6364 - DNA, 23 bp, Homo sapiens
  source 1..23: mol_type = genomic DNA
ggctgcgacgtggggtcggacgg

SEQ ID NO: 6365 - DNA, 23 bp, Homo sapiens
  source 1..23: mol_type = genomic DNA
ggctgctgcaggggtcaaagagg

SEQ ID NO: 6366 - DNA, 23 bp, Homo sapiens
  source 1..23: mol_type = genomic DNA
ggctgctgcaggggtcaaagggg

SEQ ID NO: 6367 - DNA, 23 bp, Homo sapiens
  source 1..23: mol_type = genomic DNA
ggctggagtagaacaaaaacagg

SEQ ID NO: 6368 - DNA, 23 bp, Homo sapiens
  source 1..23: mol_type = genomic DNA
ggctggcctcccacaaggagggg

SEQ ID NO: 6369 - DNA, 23 bp, Homo sapiens
  source 1..23: mol_type = genomic DNA
gggaaaagaggagaaggtgaggg

SEQ ID NO: 6370 - DNA, 23 bp, Homo sapiens
  source 1..23: mol_type = genomic DNA
gggaaaagaggggaaggtgaggg

SEQ ID NO: 6371 - DNA, 23 bp, Homo sapiens
  source 1..23: mol_type = genomic DNA
gggaaaaggcctaggtaatgggg

SEQ ID NO: 6372 - DNA, 23 bp, Homo sapiens
  source 1..23: mol_type = genomic DNA
gggaaaaggcctgggtaatgggg

SEQ ID NO: 6373 - DNA, 23 bp, Homo sapiens
  source 1..23: mol_type = genomic DNA
gggaaacggcctctgcggagagg

SEQ ID NO: 6374 - DNA, 23 bp, Homo sapiens
  source 1..23: mol_type = genomic DNA
gggaaacggcctctggggagagg

SEQ ID NO: 6375 - DNA, 23 bp, Homo sapiens
  source 1..23: mol_type = genomic DNA
gggaaagcagctgtgggttctgg

SEQ ID NO: 6376 - DNA, 23 bp, Homo sapiens
  source 1..23: mol_type = genomic DNA
gggaaagcagttgtgggttctgg

SEQ ID NO: 6377 - DNA, 23 bp, Homo sapiens
  source 1..23: mol_type = genomic DNA
gggaaaggaagggaagatgaggg

SEQ ID NO: 6378 - DNA, 23 bp, Homo sapiens
  source 1..23: mol_type = genomic DNA
gggaaaggaggagaaggtgaggg

SEQ ID NO: 6379 - DNA, 23 bp, Homo sapiens
  source 1..23: mol_type = genomic DNA
gggaaaggaggggaagacgaggg

SEQ ID NO: 6380 - DNA, 23 bp, Homo sapiens
  source 1..23: mol_type = genomic DNA
gggaaaggaggggaagatgaggg

SEQ ID NO: 6381 - DNA, 23 bp, Homo sapiens
  source 1..23: mol_type = genomic DNA
gggaaaggaggggaaggtgaggg

SEQ ID NO: 6382 - DNA, 23 bp, Homo sapiens
  source 1..23: mol_type = genomic DNA
gggaaatggcctctgccgggagg

SEQ ID NO: 6383 - DNA, 23 bp, Homo sapiens
  source 1..23: mol_type = genomic DNA
gggaaatggcctctgtagggagg

SEQ ID NO: 6384 - DNA, 23 bp, Homo sapiens
  source 1..23: mol_type = genomic DNA
gggaaatggcctctgtggggagg

SEQ ID NO: 6385 - DNA, 23 bp, Homo sapiens
  source 1..23: mol_type = genomic DNA
gggaagaaaatgccctatgaggg

SEQ ID NO: 6386 - DNA, 23 bp, Homo sapiens
  source 1..23: mol_type = genomic DNA
gggaagaaaatgccctgtgaggg

SEQ ID NO: 6387 - DNA, 23 bp, Homo sapiens
  source 1..23: mol_type = genomic DNA
gggaagaaaatgtcctgtgaggg

SEQ ID NO: 6388 - DNA, 23 bp, Homo sapiens
  source 1..23: mol_type = genomic DNA
gggaagcagcatccacacagggg

SEQ ID NO: 6389 - DNA, 23 bp, Homo sapiens
  source 1..23: mol_type = genomic DNA
gggaagcagcatcctcacagggg

SEQ ID NO: 6390 - DNA, 23 bp, Homo sapiens
  source 1..23: mol_type = genomic DNA
gggaagcagcatgcacacagggg

SEQ ID NO: 6391 - DNA, 23 bp, Homo sapiens
  source 1..23: mol_type = genomic DNA
gggaagccgcgccgggaggaggg

SEQ ID NO: 6392 - DNA, 23 bp, Homo sapiens
  source 1..23: mol_type = genomic DNA
gggaagccgcgcctggaggaggg

SEQ ID NO: 6393 - DNA, 23 bp, Homo sapiens
  source 1..23: mol_type = genomic DNA
gggaagcggcctctgcggagagg

SEQ ID NO: 6394 - DNA, 23 bp, Homo sapiens
  source 1..23: mol_type = genomic DNA
gggaatcggcctctgcggagagg

SEQ ID NO: 6395 - DNA, 23 bp, Homo sapiens
  source 1..23: mol_type = genomic DNA
gggacacctggggtggggaaggg

SEQ ID NO: 6396 - DNA, 23 bp, Homo sapiens
  source 1..23: mol_type = genomic DNA
gggaccacggcgacgctgattgg

SEQ ID NO: 6397 - DNA, 23 bp, Homo sapiens
  source 1..23: mol_type = genomic DNA
gggaccccggcgacactgattgg

SEQ ID NO: 6398 - DNA, 23 bp, Homo sapiens
  source 1..23: mol_type = genomic DNA
gggaccccggcgacgctgattgg

SEQ ID NO: 6399 - DNA, 23 bp, Homo sapiens
  source 1..23: mol_type = genomic DNA
gggaccgcaggcgggggcgcagg

SEQ ID NO: 6400 - DNA, 23 bp, Homo sapiens
  source 1..23: mol_type = genomic DNA
gggaccgcaggcgggggctcagg

SEQ ID NO: 6401 - DNA, 23 bp, Homo sapiens
  source 1..23: mol_type = genomic DNA
gggaccgcggcgacgctgattgg

SEQ ID NO: 6402 - DNA, 23 bp, Homo sapiens
  source 1..23: mol_type = genomic DNA
gggacctgcgccccgggccgggg

SEQ ID NO: 6403 - DNA, 23 bp, Homo sapiens
  source 1..23: mol_type = genomic DNA
gggacgcgtcacgagtatcctgg

SEQ ID NO: 6404 - DNA, 23 bp, Homo sapiens
  source 1..23: mol_type = genomic DNA
gggacgcgtcatgagtattcagg

SEQ ID NO: 6405 - DNA, 23 bp, Homo sapiens
  source 1..23: mol_type = genomic DNA
gggacggtggactgggaagacgg

SEQ ID NO: 6406 - DNA, 23 bp, Homo sapiens
  source 1..23: mol_type = genomic DNA
gggacggtggactgggaagatgg

SEQ ID NO: 6407 - DNA, 23 bp, Homo sapiens
  source 1..23: mol_type = genomic DNA
gggacggtggattgggaagatgg

SEQ ID NO: 6408 - DNA, 23 bp, Homo sapiens
  source 1..23: mol_type = genomic DNA
gggacggtgggctgggaagatgg

SEQ ID NO: 6409 - DNA, 23 bp, Homo sapiens
  source 1..23: mol_type = genomic DNA
gggacgtttcgagtgtgtggtgg

SEQ ID NO: 6410 - DNA, 23 bp, Homo sapiens
  source 1..23: mol_type = genomic DNA
gggactgcggagacgctgattgg

SEQ ID NO: 6411 - DNA, 23 bp, Homo sapiens
  source 1..23: mol_type = genomic DNA
gggactgcgtagacgctgattgg

SEQ ID NO: 6412 - DNA, 23 bp, Homo sapiens
  source 1..23: mol_type = genomic DNA
gggactggggcggggctcggggg

SEQ ID NO: 6413 - DNA, 23 bp, Homo sapiens
  source 1..23: mol_type = genomic DNA
gggagaagaagtgaaactcaggg

SEQ ID NO: 6414 - DNA, 23 bp, Homo sapiens
  source 1..23: mol_type = genomic DNA
gggagaagaagtgaaactcgtgg

SEQ ID NO: 6415 - DNA, 23 bp, Homo sapiens
  source 1..23: mol_type = genomic DNA
gggagaatccgagtccgggtggg

SEQ ID NO: 6416 - DNA, 23 bp, Homo sapiens
  source 1..23: mol_type = genomic DNA
gggagaatctgagtcccggtggg

SEQ ID NO: 6417 - DNA, 23 bp, Homo sapiens
  source 1..23: mol_type = genomic DNA
gggagaatctgagtccgggtggg

SEQ ID NO: 6418 - DNA, 23 bp, Homo sapiens
  source 1..23: mol_type = genomic DNA
gggagaatgtgagtccgggtggg

SEQ ID NO: 6419 - DNA, 23 bp, Homo sapiens
  source 1..23: mol_type = genomic DNA
gggagatctacaggcgatcaggg

SEQ ID NO: 6420 - DNA, 23 bp, Homo sapiens
  source 1..23: mol_type = genomic DNA
gggagatctataggcgatcaggg

SEQ ID NO: 6421 - DNA, 23 bp, Homo sapiens
  source 1..23: mol_type = genomic DNA
gggagcctggggacgaggagtgg

SEQ ID NO: 6422 - DNA, 23 bp, Homo sapiens
  source 1..23: mol_type = genomic DNA
gggagcctgggggagaggagggg

SEQ ID NO: 6423 - DNA, 23 bp, Homo sapiens
  source 1..23: mol_type = genomic DNA
gggagcctgggggccaggagggg

SEQ ID NO: 6424 - DNA, 23 bp, Homo sapiens
  source 1..23: mol_type = genomic DNA
gggagcctgggggcgagcagtgg

SEQ ID NO: 6425 - DNA, 23 bp, Homo sapiens
  source 1..23: mol_type = genomic DNA
gggagcctgggggcgaggagggg

SEQ ID NO: 6426 - DNA, 23 bp, Homo sapiens
  source 1..23: mol_type = genomic DNA
gggagcctgggggcgaggagtgg

SEQ ID NO: 6427 - DNA, 23 bp, Homo sapiens
  source 1..23: mol_type = genomic DNA
gggagcctgggggtgaggagggg

SEQ ID NO: 6428 - DNA, 23 bp, Homo sapiens
  source 1..23: mol_type = genomic DNA
gggaggagagaggggaccgcagg

SEQ ID NO: 6429 - DNA, 23 bp, Homo sapiens
  source 1..23: mol_type = genomic DNA
gggaggagcaaggggaccgcagg

SEQ ID NO: 6430 - DNA, 23 bp, Homo sapiens
  source 1..23: mol_type = genomic DNA
gggaggagcgaggggaccgcagg

SEQ ID NO: 6431 - DNA, 23 bp, Homo sapiens
  source 1..23: mol_type = genomic DNA
gggaggcgccccgtggcccccgg

SEQ ID NO: 6432 - DNA, 23 bp, Homo sapiens
  source 1..23: mol_type = genomic DNA
gggaggcgccccgtggcccctgg

SEQ ID NO: 6433 - DNA, 23 bp, Homo sapiens
  source 1..23: mol_type = genomic DNA
gggagggaaaccgcctctgcggg

SEQ ID NO: 6434 - DNA, 23 bp, Homo sapiens
  source 1..23: mol_type = genomic DNA
gggagggaaacggcctctgcggg

SEQ ID NO: 6435 - DNA, 23 bp, Homo sapiens
  source 1..23: mol_type = genomic DNA
gggagggaaacggcctctgtggg

SEQ ID NO: 6436 - DNA, 23 bp, Homo sapiens
  source 1..23: mol_type = genomic DNA
gggagggaaatggcctctgccgg

SEQ ID NO: 6437 - DNA, 23 bp, Homo sapiens
  source 1..23: mol_type = genomic DNA
gggagggaaatggcctctgtggg

SEQ ID NO: 6438 - DNA, 23 bp, Homo sapiens
  source 1..23: mol_type = genomic DNA
gggagtcgtgacctgcgccccgg

SEQ ID NO: 6439 - DNA, 23 bp, Homo sapiens
  source 1..23: mol_type = genomic DNA
gggatgcagcatccacacagggg

SEQ ID NO: 6440 - DNA, 23 bp, Homo sapiens
  source 1..23: mol_type = genomic DNA
gggatgcgtcacgagtatcctgg

SEQ ID NO: 6441 - DNA, 23 bp, Homo sapiens
  source 1..23: mol_type = genomic DNA
gggatggaaccttccagaagtgg

SEQ ID NO: 6442 - DNA, 23 bp, Homo sapiens
  source 1..23: mol_type = genomic DNA
gggatggcctcccacgaggaggg

SEQ ID NO: 6443 - DNA, 23 bp, Homo sapiens
  source 1..23: mol_type = genomic DNA
gggatggccttccacgaggaggg

SEQ ID NO: 6444 - DNA, 23 bp, Homo sapiens
  source 1..23: mol_type = genomic DNA
gggatgggaccttccagaagtgg

SEQ ID NO: 6445 - DNA, 23 bp, Homo sapiens
  source 1..23: mol_type = genomic DNA
gggatggtaggctgggaagatgg

SEQ ID NO: 6446 - DNA, 23 bp, Homo sapiens
  source 1..23: mol_type = genomic DNA
gggatggtggactgggaagacgg

SEQ ID NO: 6447 - DNA, 23 bp, Homo sapiens
  source 1..23: mol_type = genomic DNA
gggatggtggactgggaagatgg

SEQ ID NO: 6448 - DNA, 23 bp, Homo sapiens
  source 1..23: mol_type = genomic DNA
gggatggtgggctgggaagacgg

SEQ ID NO: 6449 - DNA, 23 bp, Homo sapiens
  source 1..23: mol_type = genomic DNA
gggatggtgggctgggaagatgg

SEQ ID NO: 6450 - DNA, 23 bp, Homo sapiens
  source 1..23: mol_type = genomic DNA
gggatgttacgcgtgtgtggtgg

SEQ ID NO: 6451 - DNA, 23 bp, Homo sapiens
  source 1..23: mol_type = genomic DNA
gggatgtttcgcgtgtgtcgtgg

SEQ ID NO: 6452 - DNA, 23 bp, Homo sapiens
  source 1..23: mol_type = genomic DNA
gggatgtttcgcgtgtgtgatgg

SEQ ID NO: 6453 - DNA, 23 bp, Homo sapiens
  source 1..23: mol_type = genomic DNA
gggatgtttcgcgtgtgtggtgg

SEQ ID NO: 6454 - DNA, 23 bp, Homo sapiens
  source 1..23: mol_type = genomic DNA
gggcaggatcaggaaacacaggg

SEQ ID NO: 6455 - DNA, 23 bp, Homo sapiens
  source 1..23: mol_type = genomic DNA
gggcaggatcaggaaacacgagg

SEQ ID NO: 6456 - DNA, 23 bp, Homo sapiens
  source 1..23: mol_type = genomic DNA
gggcaggatcaggaaacacgggg

SEQ ID NO: 6457 - DNA, 23 bp, Homo sapiens
  source 1..23: mol_type = genomic DNA
gggcaggatcaggaaacatgggg

SEQ ID NO: 6458 - DNA, 23 bp, Homo sapiens
  source 1..23: mol_type = genomic DNA
gggcaggtgagtgcggggtcggg

SEQ ID NO: 6459 - DNA, 23 bp, Homo sapiens
  source 1..23: mol_type = genomic DNA
gggcattttcttcccacaggtgg

SEQ ID NO: 6460 - DNA, 23 bp, Homo sapiens
  source 1..23: mol_type = genomic DNA
gggccacctggcccgtccgtggg

SEQ ID NO: 6461 - DNA, 23 bp, Homo sapiens
  source 1..23: mol_type = genomic DNA
gggccccaggcgtggctctcagg

SEQ ID NO: 6462 - DNA, 23 bp, Homo sapiens
  source 1..23: mol_type = genomic DNA
gggcccccaagagtagcaggagg

SEQ ID NO: 6463 - DNA, 23 bp, Homo sapiens
  source 1..23: mol_type = genomic DNA
gggccccccagagcagcaggagg

SEQ ID NO: 6464 - DNA, 23 bp, Homo sapiens
  source 1..23: mol_type = genomic DNA
gggcccccgagagtagcaggagg

SEQ ID NO: 6465 - DNA, 23 bp, Homo sapiens
  source 1..23: mol_type = genomic DNA
gggccctgggcttctaccctggg

SEQ ID NO: 6466 - DNA, 23 bp, Homo sapiens
  source 1..23: mol_type = genomic DNA
gggccgccgagagcagcaggagg

SEQ ID NO: 6467 - DNA, 23 bp, Homo sapiens
  source 1..23: mol_type = genomic DNA
gggccgcctccaacttgcgctgg

SEQ ID NO: 6468 - DNA, 23 bp, Homo sapiens
  source 1..23: mol_type = genomic DNA
gggccgcctcccacttgagctgg

SEQ ID NO: 6469 - DNA, 23 bp, Homo sapiens
  source 1..23: mol_type = genomic DNA
gggccgcctcccacttgcgctgg

SEQ ID NO: 6470 - DNA, 23 bp, Homo sapiens
  source 1..23: mol_type = genomic DNA
gggccgcgtctgcaatggggagg

SEQ ID NO: 6471 - DNA, 23 bp, Homo sapiens
  source 1..23: mol_type = genomic DNA
gggccgcgtctgcattggggagg

SEQ ID NO: 6472 - DNA, 23 bp, Homo sapiens
  source 1..23: mol_type = genomic DNA
gggccggtgagtgcgggatcggg

SEQ ID NO: 6473 - DNA, 23 bp, Homo sapiens
  source 1..23: mol_type = genomic DNA
gggccggtgagtgcggggtcggg

SEQ ID NO: 6474 - DNA, 23 bp, Homo sapiens
  source 1..23: mol_type = genomic DNA
gggccggtgagtgcggggttggg

SEQ ID NO: 6475 - DNA, 23 bp, Homo sapiens
  source 1..23: mol_type = genomic DNA
gggccgtctcccacttgcgctgg

SEQ ID NO: 6476 - DNA, 23 bp, Homo sapiens
  source 1..23: mol_type = genomic DNA
gggccgtgtctgcactggggagg

SEQ ID NO: 6477 - DNA, 23 bp, Homo sapiens
  source 1..23: mol_type = genomic DNA
gggccgtgtctgcattggggagg

SEQ ID NO: 6478 - DNA, 23 bp, Homo sapiens
  source 1..23: mol_type = genomic DNA
gggcctgtgagtgcgaggttggg

SEQ ID NO: 6479 - DNA, 23 bp, Homo sapiens
  source 1..23: mol_type = genomic DNA
gggcctgtgagtgcggggttagg

SEQ ID NO: 6480 - DNA, 23 bp, Homo sapiens
  source 1..23: mol_type = genomic DNA
gggcctgtgagtgcggggttggg

SEQ ID NO: 6481 - DNA, 23 bp, Homo sapiens
  source 1..23: mol_type = genomic DNA
gggcgaagtaccagggccccagg

SEQ ID NO: 6482 - DNA, 23 bp, Homo sapiens
  source 1..23: mol_type = genomic DNA
gggcgaagtcccagggccccagg

SEQ ID NO: 6483 - DNA, 23 bp, Homo sapiens
  source 1..23: mol_type = genomic DNA
gggcgacccggcccgtccgtggg

SEQ ID NO: 6484 - DNA, 23 bp, Homo sapiens
  source 1..23: mol_type = genomic DNA
gggcgacccgggccgtacgtggg

SEQ ID NO: 6485 - DNA, 23 bp, Homo sapiens
  source 1..23: mol_type = genomic DNA
gggcgacccgggccgtccgtggg

SEQ ID NO: 6486 - DNA, 23 bp, Homo sapiens
  source 1..23: mol_type = genomic DNA
gggcgacctggcccgtccgtagg

SEQ ID NO: 6487 - DNA, 23 bp, Homo sapiens
  source 1..23: mol_type = genomic DNA
gggcgacctggcccgtccgtggg

SEQ ID NO: 6488 - DNA, 23 bp, Homo sapiens
  source 1..23: mol_type = genomic DNA
gggcgccatcctcggactcgcgg

SEQ ID NO: 6489 - DNA, 23 bp, Homo sapiens
  source 1..23: mol_type = genomic DNA
gggcgccatcctcggactcgtgg

SEQ ID NO: 6490 - DNA, 23 bp, Homo sapiens
  source 1..23: mol_type = genomic DNA
gggcgccatgaccagcatctcgg

SEQ ID NO: 6491 - DNA, 23 bp, Homo sapiens
  source 1..23: mol_type = genomic DNA
gggcgccatgaccagcatcttgg

SEQ ID NO: 6492 - DNA, 23 bp, Homo sapiens
  source 1..23: mol_type = genomic DNA
gggcgccatgacccgcatctcgg

SEQ ID NO: 6493 - DNA, 23 bp, Homo sapiens
  source 1..23: mol_type = genomic DNA
gggcgccgtgacccgcatctcgg

SEQ ID NO: 6494 - DNA, 23 bp, Homo sapiens
  source 1..23: mol_type = genomic DNA
gggcggattccgcagcctcgggg

SEQ ID NO: 6495 - DNA, 23 bp, Homo sapiens
  source 1..23: mol_type = genomic DNA
gggcggggcggggcggggctcgg

SEQ ID NO: 6496 - DNA, 23 bp, Homo sapiens
  source 1..23: mol_type = genomic DNA
gggcggggctcggggggacgggg

SEQ ID NO: 6497 - DNA, 23 bp, Homo sapiens
  source 1..23: mol_type = genomic DNA
gggcggggctcggggggactggg

SEQ ID NO: 6498 - DNA, 23 bp, Homo sapiens
  source 1..23: mol_type = genomic DNA
gggcggggggggcggggaggggg

SEQ ID NO: 6499 - DNA, 23 bp, Homo sapiens
  source 1..23: mol_type = genomic DNA
gggcgggggggggtggggtgggg

SEQ ID NO: 6500 - DNA, 23 bp, Homo sapiens
  source 1..23: mol_type = genomic DNA
gggcgggtcccgcggcctcaggg

SEQ ID NO: 6501 - DNA, 23 bp, Homo sapiens
  source 1..23: mol_type = genomic DNA
gggcgggtcccgcggcctcgggg

SEQ ID NO: 6502 - DNA, 23 bp, Homo sapiens
  source 1..23: mol_type = genomic DNA
gggcgggtgagtgcggggtcggg

SEQ ID NO: 6503 - DNA, 23 bp, Homo sapiens
  source 1..23: mol_type = genomic DNA
gggcgggttccgcagcctcgggg

SEQ ID NO: 6504 - DNA, 23 bp, Homo sapiens
  source 1..23: mol_type = genomic DNA
gggctccccgcggccaggccggg

SEQ ID NO: 6505 - DNA, 23 bp, Homo sapiens
  source 1..23: mol_type = genomic DNA
gggctccccgcggccgggccagg

SEQ ID NO: 6506 - DNA, 23 bp, Homo sapiens
  source 1..23: mol_type = genomic DNA
gggctccccgcggccgggccggg

SEQ ID NO: 6507 - DNA, 23 bp, Homo sapiens
  source 1..23: mol_type = genomic DNA
gggctcccctctcggactcgcgg

SEQ ID NO: 6508 - DNA, 23 bp, Homo sapiens
  source 1..23: mol_type = genomic DNA
gggctcccgagagcagcaggagg

SEQ ID NO: 6509 - DNA, 23 bp, Homo sapiens
  source 1..23: mol_type = genomic DNA
gggctccgtcctcggactcgcgg

SEQ ID NO: 6510 - DNA, 23 bp, Homo sapiens
  source 1..23: mol_type = genomic DNA
gggctctccactgccgggccggg

SEQ ID NO: 6511 - DNA, 23 bp, Homo sapiens
  source 1..23: mol_type = genomic DNA
gggctctccgcggccaggccggg

SEQ ID NO: 6512 - DNA, 23 bp, Homo sapiens
  source 1..23: mol_type = genomic DNA
gggctctccgcggccgggccggg

SEQ ID NO: 6513 - DNA, 23 bp, Homo sapiens
  source 1..23: mol_type = genomic DNA
gggctctccgcggctgggccggg

SEQ ID NO: 6514 - DNA, 23 bp, Homo sapiens
  source 1..23: mol_type = genomic DNA
gggctgaggcttggaggtcaggg

SEQ ID NO: 6515 - DNA, 23 bp, Homo sapiens
  source 1..23: mol_type = genomic DNA
gggctgaggcttgggggtcaggg

SEQ ID NO: 6516 - DNA, 23 bp, Homo sapiens
  source 1..23: mol_type = genomic DNA
gggctgaggcttgggtgtaaggg

SEQ ID NO: 6517 - DNA, 23 bp, Homo sapiens
  source 1..23: mol_type = genomic DNA
gggctggcctcccacaaggaggg

SEQ ID NO: 6518 - DNA, 23 bp, Homo sapiens
  source 1..23: mol_type = genomic DNA
gggctggtgagtgcggggtcggg

SEQ ID NO: 6519 - DNA, 23 bp, Homo sapiens
  source 1..23: mol_type = genomic DNA
gggcttcccgcggccgggccggg

SEQ ID NO: 6520 - DNA, 23 bp, Homo sapiens
  source 1..23: mol_type = genomic DNA
ggggaaaggcctgggtaatgggg

SEQ ID NO: 6521 - DNA, 23 bp, Homo sapiens
  source 1..23: mol_type = genomic DNA
ggggaccgggctgaccacggggg

SEQ ID NO: 6522 - DNA, 23 bp, Homo sapiens
  source 1..23: mol_type = genomic DNA
ggggacggggctgaccacggggg

SEQ ID NO: 6523 - DNA, 23 bp, Homo sapiens
  source 1..23: mol_type = genomic DNA
ggggacggggctgaccgcggggg

SEQ ID NO: 6524 - DNA, 23 bp, Homo sapiens
  source 1..23: mol_type = genomic DNA
ggggactgggctgaccgcggggg

SEQ ID NO: 6525 - DNA, 23 bp, Homo sapiens
  source 1..23: mol_type = genomic DNA
ggggagaatccgagtccgggtgg

SEQ ID NO: 6526 - DNA, 23 bp, Homo sapiens
  source 1..23: mol_type = genomic DNA
ggggagaatctgagtcccggtgg

SEQ ID NO: 6527 - DNA, 23 bp, Homo sapiens
  source 1..23: mol_type = genomic DNA
ggggagaatctgagtccgggtgg

SEQ ID NO: 6528 - DNA, 23 bp, Homo sapiens
  source 1..23: mol_type = genomic DNA
ggggagaatgtgagtccgggtgg

SEQ ID NO: 6529 - DNA, 23 bp, Homo sapiens
  source 1..23: mol_type = genomic DNA
ggggagactcggggcgacccggg

SEQ ID NO: 6530 - DNA, 23 bp, Homo sapiens
  source 1..23: mol_type = genomic DNA
ggggagactctaggcgacccggg

SEQ ID NO: 6531 - DNA, 23 bp, Homo sapiens
  source 1..23: mol_type = genomic DNA
ggggagactctgggcgacccggg

SEQ ID NO: 6532 - DNA, 23 bp, Homo sapiens
  source 1..23: mol_type = genomic DNA
ggggagccgcgcagggaggaggg

SEQ ID NO: 6533 - DNA, 23 bp, Homo sapiens
  source 1..23: mol_type = genomic DNA
ggggagccgcgcagggaggtggg

SEQ ID NO: 6534 - DNA, 23 bp, Homo sapiens
  source 1..23: mol_type = genomic DNA
ggggagccgcgccgggacgaggg

SEQ ID NO: 6535 - DNA, 23 bp, Homo sapiens
  source 1..23: mol_type = genomic DNA
ggggagccgcgccgggaggaggg

SEQ ID NO: 6536 - DNA, 23 bp, Homo sapiens
  source 1..23: mol_type = genomic DNA
ggggagggggcagaggggaaagg

SEQ ID NO: 6537 - DNA, 23 bp, Homo sapiens
  source 1..23: mol_type = genomic DNA
ggggcagagggaaaaggcctagg

SEQ ID NO: 6538 - DNA, 23 bp, Homo sapiens
  source 1..23: mol_type = genomic DNA
ggggcagagggaaaaggcctggg

SEQ ID NO: 6539 - DNA, 23 bp, Homo sapiens
  source 1..23: mol_type = genomic DNA
ggggcagaggggaaaggcctggg

SEQ ID NO: 6540 - DNA, 23 bp, Homo sapiens
  source 1..23: mol_type = genomic DNA
ggggcagtggggaaaggcctggg

SEQ ID NO: 6541 - DNA, 23 bp, Homo sapiens
  source 1..23: mol_type = genomic DNA
ggggccctcagaagaaactcagg

SEQ ID NO: 6542 - DNA, 23 bp, Homo sapiens
  source 1..23: mol_type = genomic DNA
ggggccctcagaggaaactcagg

SEQ ID NO: 6543 - DNA, 23 bp, Homo sapiens
  source 1..23: mol_type = genomic DNA
ggggccctcagaggaaactcggg

SEQ ID NO: 6544 - DNA, 23 bp, Homo sapiens
  source 1..23: mol_type = genomic DNA
ggggccctgaccctgctgaaggg

SEQ ID NO: 6545 - DNA, 23 bp, Homo sapiens
  source 1..23: mol_type = genomic DNA
ggggccggagtattgggaccagg

SEQ ID NO: 6546 - DNA, 23 bp, Homo sapiens
  source 1..23: mol_type = genomic DNA
ggggccggagtattgggacgagg

SEQ ID NO: 6547 - DNA, 23 bp, Homo sapiens
  source 1..23: mol_type = genomic DNA
ggggccggagtattgggacgggg

SEQ ID NO: 6548 - DNA, 23 bp, Homo sapiens
  source 1..23: mol_type = genomic DNA
ggggcgacccgggccgtacgtgg

SEQ ID NO: 6549 - DNA, 23 bp, Homo sapiens
  source 1..23: mol_type = genomic DNA
ggggcgacccgggccgtccgtgg

SEQ ID NO: 6550 - DNA, 23 bp, Homo sapiens
  source 1..23: mol_type = genomic DNA
ggggcggggagggggcagagggg

SEQ ID NO: 6551 - DNA, 23 bp, Homo sapiens
  source 1..23: mol_type = genomic DNA
ggggcggggcggggctcgggggg

SEQ ID NO: 6552 - DNA, 23 bp, Homo sapiens
  source 1..23: mol_type = genomic DNA
ggggcggggctcgcgggacgggg

SEQ ID NO: 6553 - DNA, 23 bp, Homo sapiens
  source 1..23: mol_type = genomic DNA
ggggcggggctcgggggaccggg

SEQ ID NO: 6554 - DNA, 23 bp, Homo sapiens
  source 1..23: mol_type = genomic DNA
ggggcggggctcgggggacgggg

SEQ ID NO: 6555 - DNA, 23 bp, Homo sapiens
  source 1..23: mol_type = genomic DNA
ggggcggggctcgggggactggg

SEQ ID NO: 6556 - DNA, 23 bp, Homo sapiens
  source 1..23: mol_type = genomic DNA
ggggcggggctcggggggacggg

SEQ ID NO: 6557 - DNA, 23 bp, Homo sapiens
  source 1..23: mol_type = genomic DNA
ggggcggggctcggggggactgg

SEQ ID NO: 6558 - DNA, 23 bp, Homo sapiens
  source 1..23: mol_type = genomic DNA
ggggctccccgcggccaggccgg

SEQ ID NO: 6559 - DNA, 23 bp, Homo sapiens
  source 1..23: mol_type = genomic DNA
ggggctccccgcggccgggccgg

SEQ ID NO: 6560 - DNA, 23 bp, Homo sapiens
  source 1..23: mol_type = genomic DNA
ggggctctccactgccgggccgg

SEQ ID NO: 6561 - DNA, 23 bp, Homo sapiens
  source 1..23: mol_type = genomic DNA
ggggctctccgcggccaggccgg

SEQ ID NO: 6562 - DNA, 23 bp, Homo sapiens
  source 1..23: mol_type = genomic DNA
ggggctctccgcggccgggccgg

SEQ ID NO: 6563 - DNA, 23 bp, Homo sapiens
  source 1..23: mol_type = genomic DNA
ggggctctccgcggctgggccgg

SEQ ID NO: 6564 - DNA, 23 bp, Homo sapiens
  source 1..23: mol_type = genomic DNA
ggggctggggcggggctcgcggg

SEQ ID NO: 6565 - DNA, 23 bp, Homo sapiens
  source 1..23: mol_type = genomic DNA
ggggctggggcggggctcggggg

SEQ ID NO: 6566 - DNA, 23 bp, Homo sapiens
  source 1..23: mol_type = genomic DNA
ggggcttcccgcggccgggccgg

SEQ ID NO: 6567 - DNA, 23 bp, Homo sapiens
  source 1..23: mol_type = genomic DNA
gggggaccgggctgaccacgggg

SEQ ID NO: 6568 - DNA, 23 bp, Homo sapiens
  source 1..23: mol_type = genomic DNA
gggggaccgggctgaccgcgggg

SEQ ID NO: 6569 - DNA, 23 bp, Homo sapiens
  source 1..23: mol_type = genomic DNA
gggggaccgggctgacctcgggg

SEQ ID NO: 6570 - DNA, 23 bp, Homo sapiens
  source 1..23: mol_type = genomic DNA
gggggacgggctgaccacggggg

SEQ ID NO: 6571 - DNA, 23 bp, Homo sapiens
  source 1..23: mol_type = genomic DNA
gggggacggggctgaccacgggg

SEQ ID NO: 6572 - DNA, 23 bp, Homo sapiens
  source 1..23: mol_type = genomic DNA
gggggacggggctgaccgcgggg

SEQ ID NO: 6573 - DNA, 23 bp, Homo sapiens
  source 1..23: mol_type = genomic DNA
gggggacggtgctgaccgcgggg

SEQ ID NO: 6574 - DNA, 23 bp, Homo sapiens
  source 1..23: mol_type = genomic DNA
gggggactgggctgaccgcgggg

SEQ ID NO: 6575 - DNA, 23 bp, Homo sapiens
  source 1..23: mol_type = genomic DNA
gggggactgggctgaccgtgggg

SEQ ID NO: 6576 - DNA, 23 bp, Homo sapiens
  source 1..23: mol_type = genomic DNA
gggggagccgcgccgggacgagg

SEQ ID NO: 6577 - DNA, 23 bp, Homo sapiens
  source 1..23: mol_type = genomic DNA
gggggagccgcgccgggaggagg

SEQ ID NO: 6578 - DNA, 23 bp, Homo sapiens
  source 1..23: mol_type = genomic DNA
gggggcagaggggaaaggcctgg

SEQ ID NO: 6579 - DNA, 23 bp, Homo sapiens
  source 1..23: mol_type = genomic DNA
gggggccctcagaggaaactcgg

SEQ ID NO: 6580 - DNA, 23 bp, Homo sapiens
  source 1..23: mol_type = genomic DNA
gggggcggggagggggcagaggg

SEQ ID NO: 6581 - DNA, 23 bp, Homo sapiens
  source 1..23: mol_type = genomic DNA
ggggggacggggctgaccgcggg

SEQ ID NO: 6582 - DNA, 23 bp, Homo sapiens
  source 1..23: mol_type = genomic DNA
ggggggactgggctgaccgcggg

SEQ ID NO: 6583 - DNA, 23 bp, Homo sapiens
  source 1..23: mol_type = genomic DNA
ggggggcggggagggggcagagg

SEQ ID NO: 6584 - DNA, 23 bp, Homo sapiens
  source 1..23: mol_type = genomic DNA
gggggggggtggggtggggaggg

SEQ ID NO: 6585 - DNA, 23 bp, Homo sapiens
  source 1..23: mol_type = genomic DNA
ggggggggtggggtggggagggg

SEQ ID NO: 6586 - DNA, 23 bp, Homo sapiens
  source 1..23: mol_type = genomic DNA
ggggggggtggtggggcagaggg

SEQ ID NO: 6587 - DNA, 23 bp, Homo sapiens
  source 1..23: mol_type = genomic DNA
gggggggtggggtggggaggggg

SEQ ID NO: 6588 - DNA, 23 bp, Homo sapiens
  source 1..23: mol_type = genomic DNA
gggggggtggtggggcagagggg

SEQ ID NO: 6589 - DNA, 23 bp, Homo sapiens
  source 1..23: mol_type = genomic DNA
gggggtggcgggtctggggcggg

SEQ ID NO: 6590 - DNA, 23 bp, Homo sapiens
  source 1..23: mol_type = genomic DNA
gggggtggggcagagggaaaagg

SEQ ID NO: 6591 - DNA, 23 bp, Homo sapiens
  source 1..23: mol_type = genomic DNA
ggggtaaggaggggaatgggggg

SEQ ID NO: 6592 - DNA, 23 bp, Homo sapiens
  source 1..23: mol_type = genomic DNA
ggggtaaggagggggatgagggg

SEQ ID NO: 6593 - DNA, 23 bp, Homo sapiens
  source 1..23: mol_type = genomic DNA
ggggtcagggcgaagtaccaggg

SEQ ID NO: 6594 - DNA, 23 bp, Homo sapiens
  source 1..23: mol_type = genomic DNA
ggggtcagggcgaagtcccaggg

SEQ ID NO: 6595 - DNA, 23 bp, Homo sapiens
  source 1..23: mol_type = genomic DNA
ggggtcccgcggcttcggggcgg

SEQ ID NO: 6596 - DNA, 23 bp, Homo sapiens
  source 1..23: mol_type = genomic DNA
ggggtcccgcggcttcggggtgg

SEQ ID NO: 6597 - DNA, 23 bp, Homo sapiens
  source 1..23: mol_type = genomic DNA
ggggtcctgaccctgctgaaggg

SEQ ID NO: 6598 - DNA, 23 bp, Homo sapiens
  source 1..23: mol_type = genomic DNA
ggggtcctgacctgcgcccccgg

SEQ ID NO: 6599 - DNA, 23 bp, Homo sapiens
  source 1..23: mol_type = genomic DNA
ggggtcgggacctgcgccccggg

SEQ ID NO: 6600 - DNA, 23 bp, Homo sapiens
  source 1..23: mol_type = genomic DNA
ggggtcgtgacctgcgcccccgg

SEQ ID NO: 6601 - DNA, 23 bp, Homo sapiens
  source 1..23: mol_type = genomic DNA
ggggtcgtgacctgcgccccggg

SEQ ID NO: 6602 - DNA, 23 bp, Homo sapiens
  source 1..23: mol_type = genomic DNA
ggggtctagagtgggcggggggg

SEQ ID NO: 6603 - DNA, 23 bp, Homo sapiens
  source 1..23: mol_type = genomic DNA
ggggtctagagtgggtggggtgg

SEQ ID NO: 6604 - DNA, 23 bp, Homo sapiens
  source 1..23: mol_type = genomic DNA
ggggtgaagggatgaagggtggg

SEQ ID NO: 6605 - DNA, 23 bp, Homo sapiens
  source 1..23: mol_type = genomic DNA
ggggtgaaggggtgaagggtggg

SEQ ID NO: 6606 - DNA, 23 bp, Homo sapiens
  source 1..23: mol_type = genomic DNA
ggggtggcaggtctgggggtggg

SEQ ID NO: 6607 - DNA, 23 bp, Homo sapiens
  source 1..23: mol_type = genomic DNA
ggggtggcgggtctggggcgggg

SEQ ID NO: 6608 - DNA, 23 bp, Homo sapiens
  source 1..23: mol_type = genomic DNA
ggggtggcgggtctgggggtggg

SEQ ID NO: 6609 - DNA, 23 bp, Homo sapiens
  source 1..23: mol_type = genomic DNA
ggggtggggagggggcagagggg

SEQ ID NO: 6610 - DNA, 23 bp, Homo sapiens
  source 1..23: mol_type = genomic DNA
ggggtgggtgagctcccccacgg

SEQ ID NO: 6611 - DNA, 23 bp, Homo sapiens
  source 1..23: mol_type = genomic DNA
ggggtgggtgagctcccccatgg

SEQ ID NO: 6612 - DNA, 23 bp, Homo sapiens
  source 1..23: mol_type = genomic DNA
ggggtggttgagctcccccatgg

SEQ ID NO: 6613 - DNA, 23 bp, Homo sapiens
  source 1..23: mol_type = genomic DNA
gggtagccgcgccgggaggaggg

SEQ ID NO: 6614 - DNA, 23 bp, Homo sapiens
  source 1..23: mol_type = genomic DNA
gggtcacatgtgtctttgggggg

SEQ ID NO: 6615 - DNA, 23 bp, Homo sapiens
  source 1..23: mol_type = genomic DNA
gggtcacgtgtgtctttgggggg

SEQ ID NO: 6616 - DNA, 23 bp, Homo sapiens
  source 1..23: mol_type = genomic DNA
gggtcagggctgaggcttggagg

SEQ ID NO: 6617 - DNA, 23 bp, Homo sapiens
  source 1..23: mol_type = genomic DNA
gggtcagggctgaggcttggggg

SEQ ID NO: 6618 - DNA, 23 bp, Homo sapiens
  source 1..23: mol_type = genomic DNA
gggtcatatgtgtcttggggggg

SEQ ID NO: 6619 - DNA, 23 bp, Homo sapiens
  source 1..23: mol_type = genomic DNA
gggtcccgcggcctcgggggcgg

SEQ ID NO: 6620 - DNA, 23 bp, Homo sapiens
  source 1..23: mol_type = genomic DNA
gggtccgagatccgcccccgagg

SEQ ID NO: 6621 - DNA, 23 bp, Homo sapiens
  source 1..23: mol_type = genomic DNA
gggtccggagtattgggacgggg

SEQ ID NO: 6622 - DNA, 23 bp, Homo sapiens
  source 1..23: mol_type = genomic DNA
gggtcctgagcccccgcctgcgg

SEQ ID NO: 6623 - DNA, 23 bp, Homo sapiens
  source 1..23: mol_type = genomic DNA
gggtcctgcgcccccgcctgcgg

SEQ ID NO: 6624 - DNA, 23 bp, Homo sapiens
  source 1..23: mol_type = genomic DNA
gggtcgtgacctgcgcccccggg

SEQ ID NO: 6625 - DNA, 23 bp, Homo sapiens
  source 1..23: mol_type = genomic DNA
gggtctagagtgggcgggggggg

SEQ ID NO: 6626 - DNA, 23 bp, Homo sapiens
  source 1..23: mol_type = genomic DNA
gggtctagagtgggtgggggtgg

SEQ ID NO: 6627 - DNA, 23 bp, Homo sapiens
  source 1..23: mol_type = genomic DNA
gggtgacctggcccgtccgtggg

SEQ ID NO: 6628 - DNA, 23 bp, Homo sapiens
  source 1..23: mol_type = genomic DNA
gggtgagtgcggggtcgggaggg

SEQ ID NO: 6629 - DNA, 23 bp, Homo sapiens
  source 1..23: mol_type = genomic DNA
gggtgccgtgacccgcatctcgg

SEQ ID NO: 6630 - DNA, 23 bp, Homo sapiens
  source 1..23: mol_type = genomic DNA
gggtggcctcatggtcagagagg

SEQ ID NO: 6631 - DNA, 23 bp, Homo sapiens
  source 1..23: mol_type = genomic DNA
gggtgggggtggcgggtctgggg

SEQ ID NO: 6632 - DNA, 23 bp, Homo sapiens
  source 1..23: mol_type = genomic DNA
gggtggggtggcaggtctggggg

SEQ ID NO: 6633 - DNA, 23 bp, Homo sapiens
  source 1..23: mol_type = genomic DNA
gggtggggtggcgggtctggggg

SEQ ID NO: 6634 - DNA, 23 bp, Homo sapiens
  source 1..23: mol_type = genomic DNA
gggtgggtcggggcggggcgggg

SEQ ID NO: 6635 - DNA, 23 bp, Homo sapiens
  source 1..23: mol_type = genomic DNA
gggtgggtgacttcagaaccggg

SEQ ID NO: 6636 - DNA, 23 bp, Homo sapiens
  source 1..23: mol_type = genomic DNA
gggtgggtgagctcccccacggg

SEQ ID NO: 6637 - DNA, 23 bp, Homo sapiens
  source 1..23: mol_type = genomic DNA
gggtgggtgagctcccccatggg

SEQ ID NO: 6638 - DNA, 23 bp, Homo sapiens
  source 1..23: mol_type = genomic DNA
gggtggttgagctcccccatggg

SEQ ID NO: 6639 - DNA, 23 bp, Homo sapiens
  source 1..23: mol_type = genomic DNA
gggttccgcagatccaccttggg

SEQ ID NO: 6640 - DNA, 23 bp, Homo sapiens
  source 1..23: mol_type = genomic DNA
gggttgggcggggcggggcgggg

SEQ ID NO: 6641 - DNA, 23 bp, Homo sapiens
  source 1..23: mol_type = genomic DNA
gggttggtcagggcggggcgggg

SEQ ID NO: 6642 - DNA, 23 bp, Homo sapiens
  source 1..23: mol_type = genomic DNA
gggttggtcgggactggggcggg

SEQ ID NO: 6643 - DNA, 23 bp, Homo sapiens
  source 1..23: mol_type = genomic DNA
gggttggtcggggccggacgggg

SEQ ID NO: 6644 - DNA, 23 bp, Homo sapiens
  source 1..23: mol_type = genomic DNA
gggttggtcggggccgggcaggg

SEQ ID NO: 6645 - DNA, 23 bp, Homo sapiens
  source 1..23: mol_type = genomic DNA
gggttggtcggggccgggcgggg

SEQ ID NO: 6646 - DNA, 23 bp, Homo sapiens
  source 1..23: mol_type = genomic DNA
gggttggtcggggcggggcgggg

SEQ ID NO: 6647 - DNA, 23 bp, Homo sapiens
  source 1..23: mol_type = genomic DNA
gggttggtcggggctgggcgggg

SEQ ID NO: 6648 - DNA, 23 bp, Homo sapiens
  source 1..23: mol_type = genomic DNA
gggttggtcggggctggggcggg

SEQ ID NO: 6649 - DNA, 23 bp, Homo sapiens
  source 1..23: mol_type = genomic DNA
gggttttcttgtcccactggggg

SEQ ID NO: 6650 - DNA, 23 bp, Homo sapiens
  source 1..23: mol_type = genomic DNA
ggtaatggacattctttgattgg

SEQ ID NO: 6651 - DNA, 23 bp, Homo sapiens
  source 1..23: mol_type = genomic DNA
ggtaatggagattctttgattgg

SEQ ID NO: 6652 - DNA, 23 bp, Homo sapiens
  source 1..23: mol_type = genomic DNA
ggtaatggggatcctttgatagg

SEQ ID NO: 6653 - DNA, 23 bp, Homo sapiens
  source 1..23: mol_type = genomic DNA
ggtaatggggatcctttgattgg

SEQ ID NO: 6654 - DNA, 23 bp, Homo sapiens
  source 1..23: mol_type = genomic DNA
ggtaatggggattctttgattgg

SEQ ID NO: 6655 - DNA, 23 bp, Homo sapiens
  source 1..23: mol_type = genomic DNA
ggtacagaatctggaaacccagg

SEQ ID NO: 6656 - DNA, 23 bp, Homo sapiens
  source 1..23: mol_type = genomic DNA
ggtacaggatctggaaacccagg

SEQ ID NO: 6657 - DNA, 23 bp, Homo sapiens
  source 1..23: mol_type = genomic DNA
ggtagaacaaaaacagaacctgg

SEQ ID NO: 6658 - DNA, 23 bp, Homo sapiens
  source 1..23: mol_type = genomic DNA
ggtaggacaaaaacagaacctgg

SEQ ID NO: 6659 - DNA, 23 bp, Homo sapiens
  source 1..23: mol_type = genomic DNA
ggtaggcccataattgtggatgg

SEQ ID NO: 6660 - DNA, 23 bp, Homo sapiens
  source 1..23: mol_type = genomic DNA
ggtaggcccataattgtgggtgg

SEQ ID NO: 6661 - DNA, 23 bp, Homo sapiens
  source 1..23: mol_type = genomic DNA
ggtaggcccatgattgtggacgg

SEQ ID NO: 6662 - DNA, 23 bp, Homo sapiens
  source 1..23: mol_type = genomic DNA
ggtaggcccatgattgtggatgg

SEQ ID NO: 6663 - DNA, 23 bp, Homo sapiens
  source 1..23: mol_type = genomic DNA
ggtaggcgccccgtggcccctgg

SEQ ID NO: 6664 - DNA, 23 bp, Homo sapiens
  source 1..23: mol_type = genomic DNA
ggtaggctcataattgtggatgg

SEQ ID NO: 6665 - DNA, 23 bp, Homo sapiens
  source 1..23: mol_type = genomic DNA
ggtagggaaggggtgaagagcgg

SEQ ID NO: 6666 - DNA, 23 bp, Homo sapiens
  source 1..23: mol_type = genomic DNA
ggtagggaaggggtgaggagtgg

SEQ ID NO: 6667 - DNA, 23 bp, Homo sapiens
  source 1..23: mol_type = genomic DNA
ggtagggaaggggtgaggggtgg

SEQ ID NO: 6668 - DNA, 23 bp, Homo sapiens
  source 1..23: mol_type = genomic DNA
ggtcacagtggacacaagggtgg

SEQ ID NO: 6669 - DNA, 23 bp, Homo sapiens
  source 1..23: mol_type = genomic DNA
ggtcacagtggacacaaggttgg

SEQ ID NO: 6670 - DNA, 23 bp, Homo sapiens
  source 1..23: mol_type = genomic DNA
ggtcacagtggacacacagttgg

SEQ ID NO: 6671 - DNA, 23 bp, Homo sapiens
  source 1..23: mol_type = genomic DNA
ggtcacagtggacacgggggtgg

SEQ ID NO: 6672 - DNA, 23 bp, Homo sapiens
  source 1..23: mol_type = genomic DNA
ggtcacggtggacacgggggtgg

SEQ ID NO: 6673 - DNA, 23 bp, Homo sapiens
  source 1..23: mol_type = genomic DNA
ggtcagggcggggcggggctcgg

SEQ ID NO: 6674 - DNA, 23 bp, Homo sapiens
  source 1..23: mol_type = genomic DNA
ggtcatatgtgtcttgggggggg

SEQ ID NO: 6675 - DNA, 23 bp, Homo sapiens
  source 1..23: mol_type = genomic DNA
ggtcatggtggacatcggggtgg

SEQ ID NO: 6676 - DNA, 23 bp, Homo sapiens
  source 1..23: mol_type = genomic DNA
ggtcatggtggacatgggggtgg

SEQ ID NO: 6677 - DNA, 23 bp, Homo sapiens
  source 1..23: mol_type = genomic DNA
ggtcccatcccctgcaggcctgg

SEQ ID NO: 6678 - DNA, 23 bp, Homo sapiens
  source 1..23: mol_type = genomic DNA
ggtcccggacggggctctcaggg

SEQ ID NO: 6679 - DNA, 23 bp, Homo sapiens
  source 1..23: mol_type = genomic DNA
ggtcccgggcggggctctcaggg

SEQ ID NO: 6680 - DNA, 23 bp, Homo sapiens
  source 1..23: mol_type = genomic DNA
ggtcccgggcggggctctctggg

SEQ ID NO: 6681 - DNA, 23 bp, Homo sapiens
  source 1..23: mol_type = genomic DNA
ggtcccgggcggggttctcaggg

SEQ ID NO: 6682 - DNA, 23 bp, Homo sapiens
  source 1..23: mol_type = genomic DNA
ggtccctgacgacagatctcagg

SEQ ID NO: 6683 - DNA, 23 bp, Homo sapiens
  source 1..23: mol_type = genomic DNA
ggtccctgaggacagacctcagg

SEQ ID NO: 6684 - DNA, 23 bp, Homo sapiens
  source 1..23: mol_type = genomic DNA
ggtccctgaggaccttcaggagg

SEQ ID NO: 6685 - DNA, 23 bp, Homo sapiens
  source 1..23: mol_type = genomic DNA
ggtccgcgtcgtgagtatccagg

SEQ ID NO: 6686 - DNA, 23 bp, Homo sapiens
  source 1..23: mol_type = genomic DNA
ggtcctgcgcccccgccaggagg

SEQ ID NO: 6687 - DNA, 23 bp, Homo sapiens
  source 1..23: mol_type = genomic DNA
ggtcctgcgcccccgccaggcgg

SEQ ID NO: 6688 - DNA, 23 bp, Homo sapiens
  source 1..23: mol_type = genomic DNA
ggtcctgcgcccccgccgggcgg

SEQ ID NO: 6689 - DNA, 23 bp, Homo sapiens
  source 1..23: mol_type = genomic DNA
ggtcctgcgccctcgccgggagg

SEQ ID NO: 6690 - DNA, 23 bp, Homo sapiens
  source 1..23: mol_type = genomic DNA
ggtcctgcgccctcgccgggcgg

SEQ ID NO: 6691 - DNA, 23 bp, Homo sapiens
  source 1..23: mol_type = genomic DNA
ggtcctgcgtccccgccgggcgg

SEQ ID NO: 6692 - DNA, 23 bp, Homo sapiens
  source 1..23: mol_type = genomic DNA
ggtccttgggatattgtggttgg

SEQ ID NO: 6693 - DNA, 23 bp, Homo sapiens
  source 1..23: mol_type = genomic DNA
ggtccttgggatattgtgtttgg

SEQ ID NO: 6694 - DNA, 23 bp, Homo sapiens
  source 1..23: mol_type = genomic DNA
ggtcgcagccaaacatccactgg

SEQ ID NO: 6695 - DNA, 23 bp, Homo sapiens
  source 1..23: mol_type = genomic DNA
ggtcgcagccaaacatcctctgg

SEQ ID NO: 6696 - DNA, 23 bp, Homo sapiens
  source 1..23: mol_type = genomic DNA
ggtcgcagccacacatccactgg

SEQ ID NO: 6697 - DNA, 23 bp, Homo sapiens
  source 1..23: mol_type = genomic DNA
ggtcgcagccagacatcctctgg

SEQ ID NO: 6698 - DNA, 23 bp, Homo sapiens
  source 1..23: mol_type = genomic DNA
ggtcgcagccatacatcctctgg

SEQ ID NO: 6699 - DNA, 23 bp, Homo sapiens
  source 1..23: mol_type = genomic DNA
ggtcgcagccgtacatccactgg

SEQ ID NO: 6700 - DNA, 23 bp, Homo sapiens
  source 1..23: mol_type = genomic DNA
ggtcggcccatgattgtggaagg

SEQ ID NO: 6701 - DNA, 23 bp, Homo sapiens
  source 1..23: mol_type = genomic DNA
ggtcggcccatgattgtggatgg

SEQ ID NO: 6702 - DNA, 23 bp, Homo sapiens
  source 1..23: mol_type = genomic DNA
ggtcggggccggacggggctcgg

SEQ ID NO: 6703 - DNA, 23 bp, Homo sapiens
  source 1..23: mol_type = genomic DNA
ggtcggggccgggcagggcttgg

SEQ ID NO: 6704 - DNA, 23 bp, Homo sapiens
  source 1..23: mol_type = genomic DNA
ggtcggggccgggcggggctcgg

SEQ ID NO: 6705 - DNA, 23 bp, Homo sapiens
  source 1..23: mol_type = genomic DNA
ggtcggggcggggcggggcgggg

SEQ ID NO: 6706 - DNA, 23 bp, Homo sapiens
  source 1..23: mol_type = genomic DNA
ggtcggggcggggcggggctcgg

SEQ ID NO: 6707 - DNA, 23 bp, Homo sapiens
  source 1..23: mol_type = genomic DNA
ggtcggggctgggcggggctcgg

SEQ ID NO: 6708 - DNA, 23 bp, Homo sapiens
  source 1..23: mol_type = genomic DNA
ggtctagagtgggcggggggggg

SEQ ID NO: 6709 - DNA, 23 bp, Homo sapiens
  source 1..23: mol_type = genomic DNA
ggtctgcagtcacacatttctgg

SEQ ID NO: 6710 - DNA, 23 bp, Homo sapiens
  source 1..23: mol_type = genomic DNA
ggtctgcattcacacatttctgg

SEQ ID NO: 6711 - DNA, 23 bp, Homo sapiens
  source 1..23: mol_type = genomic DNA
ggtcttgcgcccccgccaggcgg

SEQ ID NO: 6712 - DNA, 23 bp, Homo sapiens
  source 1..23: mol_type = genomic DNA
ggtgaaatacctcatggagtggg

SEQ ID NO: 6713 - DNA, 23 bp, Homo sapiens
  source 1..23: mol_type = genomic DNA
ggtgacctcatggtcagagatgg

SEQ ID NO: 6714 - DNA, 23 bp, Homo sapiens
  source 1..23: mol_type = genomic DNA
ggtgacctggcccgtccgtgggg

SEQ ID NO: 6715 - DNA, 23 bp, Homo sapiens
  source 1..23: mol_type = genomic DNA
ggtgagtcatatgcgtcctgggg

SEQ ID NO: 6716 - DNA, 23 bp, Homo sapiens
  source 1..23: mol_type = genomic DNA
ggtgagtcatatgcgtcttgggg

SEQ ID NO: 6717 - DNA, 23 bp, Homo sapiens
  source 1..23: mol_type = genomic DNA
ggtgagtcatatgcgttttgggg

SEQ ID NO: 6718 - DNA, 23 bp, Homo sapiens
  source 1..23: mol_type = genomic DNA
ggtgagtcatatgtgtcttgggg

SEQ ID NO: 6719 - DNA, 23 bp, Homo sapiens
  source 1..23: mol_type = genomic DNA
ggtgatgtatggctgcgacgtgg

SEQ ID NO: 6720 - DNA, 23 bp, Homo sapiens
  source 1..23: mol_type = genomic DNA
ggtgcttccagtaacaaggcggg

SEQ ID NO: 6721 - DNA, 23 bp, Homo sapiens
  source 1..23: mol_type = genomic DNA
ggtgcttccagtaacgaggtggg

SEQ ID NO: 6722 - DNA, 23 bp, Homo sapiens
  source 1..23: mol_type = genomic DNA
ggtggagaaggggtgaaaggtgg

SEQ ID NO: 6723 - DNA, 23 bp, Homo sapiens
  source 1..23: mol_type = genomic DNA
ggtggagaaggggtgaagggtgg

SEQ ID NO: 6724 - DNA, 23 bp, Homo sapiens
  source 1..23: mol_type = genomic DNA
ggtggcctcatggtcagagacgg

SEQ ID NO: 6725 - DNA, 23 bp, Homo sapiens
  source 1..23: mol_type = genomic DNA
ggtggcctcatggtcagagaggg

SEQ ID NO: 6726 - DNA, 23 bp, Homo sapiens
  source 1..23: mol_type = genomic DNA
ggtggcctcatggtcagagatgg

SEQ ID NO: 6727 - DNA, 23 bp, Homo sapiens
  source 1..23: mol_type = genomic DNA
ggtgggcccatgattgtgggtgg

SEQ ID NO: 6728 - DNA, 23 bp, Homo sapiens
  source 1..23: mol_type = genomic DNA
ggtggggaagggatgaagggtgg

SEQ ID NO: 6729 - DNA, 23 bp, Homo sapiens
  source 1..23: mol_type = genomic DNA
ggtggggaaggggtgaagggtgg

SEQ ID NO: 6730 - DNA, 23 bp, Homo sapiens
  source 1..23: mol_type = genomic DNA
ggtggggcacacttctacctggg

SEQ ID NO: 6731 - DNA, 23 bp, Homo sapiens
  source 1..23: mol_type = genomic DNA
ggtgggtcacatgtgtctttggg

SEQ ID NO: 6732 - DNA, 23 bp, Homo sapiens
  source 1..23: mol_type = genomic DNA
ggtgggtcacgtgtgtctttggg

SEQ ID NO: 6733 - DNA, 23 bp, Homo sapiens
  source 1..23: mol_type = genomic DNA
ggtgggtcatatgtgtcttgggg

SEQ ID NO: 6734 - DNA, 23 bp, Homo sapiens
  source 1..23: mol_type = genomic DNA
ggtggtgcttcccagtaacgagg

SEQ ID NO: 6735 - DNA, 23 bp, Homo sapiens
  source 1..23: mol_type = genomic DNA
ggtggtggggcagaggggaaagg

SEQ ID NO: 6736 - DNA, 23 bp, Homo sapiens
  source 1..23: mol_type = genomic DNA
ggtgtcgtccacgtagcccacgg

SEQ ID NO: 6737 - DNA, 23 bp, Homo sapiens
  source 1..23: mol_type = genomic DNA
ggtgtgacccctcactgtgatgg

SEQ ID NO: 6738 - DNA, 23 bp, Homo sapiens
  source 1..23: mol_type = genomic DNA
ggttccatcccctgcaggcctgg

SEQ ID NO: 6739 - DNA, 23 bp, Homo sapiens
  source 1..23: mol_type = genomic DNA
ggttccatctcctgctggcctgg

SEQ ID NO: 6740 - DNA, 23 bp, Homo sapiens
  source 1..23: mol_type = genomic DNA
ggttcccaaggctgctgcagggg

SEQ ID NO: 6741 - DNA, 23 bp, Homo sapiens
  source 1..23: mol_type = genomic DNA
ggttccgcagatccaccttgggg

SEQ ID NO: 6742 - DNA, 23 bp, Homo sapiens
  source 1..23: mol_type = genomic DNA
ggttctatctcctgctggtctgg

SEQ ID NO: 6743 - DNA, 23 bp, Homo sapiens
  source 1..23: mol_type = genomic DNA
ggttctgtctcctgctggtctgg

SEQ ID NO: 6744 - DNA, 23 bp, Homo sapiens
  source 1..23: mol_type = genomic DNA
ggttgggagaagtgaaactcagg

SEQ ID NO: 6745 - DNA, 23 bp, Homo sapiens
  source 1..23: mol_type = genomic DNA
ggttggtcgggactggggcgggg

SEQ ID NO: 6746 - DNA, 23 bp, Homo sapiens
  source 1..23: mol_type = genomic DNA
ggttggtcggggctggggcgggg

SEQ ID NO: 6747 - DNA, 23 bp, Homo sapiens
  source 1..23: mol_type = genomic DNA
ggtttaggccaaaatccccgcgg

SEQ ID NO: 6748 - DNA, 23 bp, Homo sapiens
  source 1..23: mol_type = genomic DNA
gtaaagtgactcagaagtgctgg

SEQ ID NO: 6749 - DNA, 23 bp, Homo sapiens
  source 1..23: mol_type = genomic DNA
gtaagcgatgacactctgaacgg

SEQ ID NO: 6750 - DNA, 23 bp, Homo sapiens
  source 1..23: mol_type = genomic DNA
gtaagtctgtgtgttggtcttgg

SEQ ID NO: 6751 - DNA, 23 bp, Homo sapiens
  source 1..23: mol_type = genomic DNA
gtaagtgatgacactctgaacgg

SEQ ID NO: 6752 - DNA, 23 bp, Homo sapiens
  source 1..23: mol_type = genomic DNA
gtaatccttgccgtcgtaggcgg

SEQ ID NO: 6753 - DNA, 23 bp, Homo sapiens
  source 1..23: mol_type = genomic DNA
gtaatggacattctttgattggg

SEQ ID NO: 6754 - DNA, 23 bp, Homo sapiens
  source 1..23: mol_type = genomic DNA
gtaatggagattctttgattggg

SEQ ID NO: 6755 - DNA, 23 bp, Homo sapiens
  source 1..23: mol_type = genomic DNA
gtaatggggatcctttgataggg

SEQ ID NO: 6756 - DNA, 23 bp, Homo sapiens
  source 1..23: mol_type = genomic DNA
gtaatggggatcctttgattggg

SEQ ID NO: 6757 - DNA, 23 bp, Homo sapiens
  source 1..23: mol_type = genomic DNA
gtaatggggattctttgattggg

SEQ ID NO: 6758 - DNA, 23 bp, Homo sapiens
  source 1..23: mol_type = genomic DNA
gtacggctgcgacgtggggccgg

SEQ ID NO: 6759 - DNA, 23 bp, Homo sapiens
  source 1..23: mol_type = genomic DNA
gtagaaatacctcatggagtggg

SEQ ID NO: 6760 - DNA, 23 bp, Homo sapiens
  source 1..23: mol_type = genomic DNA
gtagaaatacttcatggagtggg

SEQ ID NO: 6761 - DNA, 23 bp, Homo sapiens
  source 1..23: mol_type = genomic DNA
gtagaacaaaaaaaaagacctgg

SEQ ID NO: 6762 - DNA, 23 bp, Homo sapiens
  source 1..23: mol_type = genomic DNA
gtagcccacggcgatgaagcggg

SEQ ID NO: 6763 - DNA, 23 bp, Homo sapiens
  source 1..23: mol_type = genomic DNA
gtagcccacggtgatgaagcggg

SEQ ID NO: 6764 - DNA, 23 bp, Homo sapiens
  source 1..23: mol_type = genomic DNA
gtagcccactgagatgaagcggg

SEQ ID NO: 6765 - DNA, 23 bp, Homo sapiens
  source 1..23: mol_type = genomic DNA
gtagcccactgcaatgaagcggg

SEQ ID NO: 6766 - DNA, 23 bp, Homo sapiens
  source 1..23: mol_type = genomic DNA
gtagcccactgcgatgaagcggg

SEQ ID NO: 6767 - DNA, 23 bp, Homo sapiens
  source 1..23: mol_type = genomic DNA
gtagcccactgcgatgaagtggg

SEQ ID NO: 6768 - DNA, 23 bp, Homo sapiens
  source 1..23: mol_type = genomic DNA
gtaggaggaagagctcaggtagg

SEQ ID NO: 6769 - DNA, 23 bp, Homo sapiens
  source 1..23: mol_type = genomic DNA
gtaggaggaagagttcaggtagg

SEQ ID NO: 6770 - DNA, 23 bp, Homo sapiens
  source 1..23: mol_type = genomic DNA
gtaggcataatgtgaggaggtgg

SEQ ID NO: 6771 - DNA, 23 bp, Homo sapiens
  source 1..23: mol_type = genomic DNA
gtaggctgggaagatggctctgg

SEQ ID NO: 6772 - DNA, 23 bp, Homo sapiens
  source 1..23: mol_type = genomic DNA
gtagggaaggggtgaagagcggg

SEQ ID NO: 6773 - DNA, 23 bp, Homo sapiens
  source 1..23: mol_type = genomic DNA
gtagggaaggggtgaggagtggg

SEQ ID NO: 6774 - DNA, 23 bp, Homo sapiens
  source 1..23: mol_type = genomic DNA
gtagggaaggggtgaggggtggg

SEQ ID NO: 6775 - DNA, 23 bp, Homo sapiens
  source 1..23: mol_type = genomic DNA
gtagttctggaaacttctcttgg

SEQ ID NO: 6776 - DNA, 23 bp, Homo sapiens
  source 1..23: mol_type = genomic DNA
gtatggctgccacgtggggtcgg

SEQ ID NO: 6777 - DNA, 23 bp, Homo sapiens
  source 1..23: mol_type = genomic DNA
gtatggctgcgacctggggccgg

SEQ ID NO: 6778 - DNA, 23 bp, Homo sapiens
  source 1..23: mol_type = genomic DNA
gtatggctgcgacgtggggccgg

SEQ ID NO: 6779 - DNA, 23 bp, Homo sapiens
  source 1..23: mol_type = genomic DNA
gtatggctgcgacgtggggtcgg

SEQ ID NO: 6780 - DNA, 23 bp, Homo sapiens
  source 1..23: mol_type = genomic DNA
gtcacaggggaaggtccctgagg

SEQ ID NO: 6781 - DNA, 23 bp, Homo sapiens
  source 1..23: mol_type = genomic DNA
gtcacagtggacacaagggtggg

SEQ ID NO: 6782 - DNA, 23 bp, Homo sapiens
  source 1..23: mol_type = genomic DNA
gtcacagtggacacaaggttggg

SEQ ID NO: 6783 - DNA, 23 bp, Homo sapiens
  source 1..23: mol_type = genomic DNA
gtcacagtggacacacagttggg

SEQ ID NO: 6784 - DNA, 23 bp, Homo sapiens
  source 1..23: mol_type = genomic DNA
gtcacagtggacacgggggtggg

SEQ ID NO: 6785 - DNA, 23 bp, Homo sapiens
  source 1..23: mol_type = genomic DNA
gtcacgagtatcctggaagaagg

SEQ ID NO: 6786 - DNA, 23 bp, Homo sapiens
  source 1..23: mol_type = genomic DNA
gtcacggtggacacgggggtggg

SEQ ID NO: 6787 - DNA, 23 bp, Homo sapiens
  source 1..23: mol_type = genomic DNA
gtcactcaccggcctcgctctgg

SEQ ID NO: 6788 - DNA, 23 bp, Homo sapiens
  source 1..23: mol_type = genomic DNA
gtcactcaccgtcctcgctctgg

SEQ ID NO: 6789 - DNA, 23 bp, Homo sapiens
  source 1..23: mol_type = genomic DNA
gtcactcactggcctcgctctgg

SEQ ID NO: 6790 - DNA, 23 bp, Homo sapiens
  source 1..23: mol_type = genomic DNA
gtcagagcccacaggagacgtgg

SEQ ID NO: 6791 - DNA, 23 bp, Homo sapiens
  source 1..23: mol_type = genomic DNA
gtcagagcccacaggagatgtgg

SEQ ID NO: 6792 - DNA, 23 bp, Homo sapiens
  source 1..23: mol_type = genomic DNA
gtcagagcccgcaggagacgtgg

SEQ ID NO: 6793 - DNA, 23 bp, Homo sapiens
  source 1..23: mol_type = genomic DNA
gtcagagcccgcaggagatgtgg

SEQ ID NO: 6794 - DNA, 23 bp, Homo sapiens
  source 1..23: mol_type = genomic DNA
gtcagagccctcaggagacgtgg

SEQ ID NO: 6795 - DNA, 23 bp, Homo sapiens
  source 1..23: mol_type = genomic DNA
gtcagatcccacagaacatgtgg

SEQ ID NO: 6796 - DNA, 23 bp, Homo sapiens
  source 1..23: mol_type = genomic DNA
gtcagatcccacagaagatgtgg

SEQ ID NO: 6797 - DNA, 23 bp, Homo sapiens
  source 1..23: mol_type = genomic DNA
gtcagggccatgcgatcttaggg

SEQ ID NO: 6798 - DNA, 23 bp, Homo sapiens
  source 1..23: mol_type = genomic DNA
gtcagggcggggcggggctcggg

SEQ ID NO: 6799 - DNA, 23 bp, Homo sapiens
  source 1..23: mol_type = genomic DNA
gtcatgagtattcaggaagaagg

SEQ ID NO: 6800 - DNA, 23 bp, Homo sapiens
  source 1..23: mol_type = genomic DNA
gtcatggtggacatcggggtggg

SEQ ID NO: 6801 - DNA, 23 bp, Homo sapiens
  source 1..23: mol_type = genomic DNA
gtcatggtggacatgggggtggg

SEQ ID NO: 6802 - DNA, 23 bp, Homo sapiens
  source 1..23: mol_type = genomic DNA
gtcccaggctgggatggcccagg

SEQ ID NO: 6803 - DNA, 23 bp, Homo sapiens
  source 1..23: mol_type = genomic DNA
gtcccatgacagatgcaaaatgg

SEQ ID NO: 6804 - DNA, 23 bp, Homo sapiens
  source 1..23: mol_type = genomic DNA
gtcccgcggcctcagggaggcgg

SEQ ID NO: 6805 - DNA, 23 bp, Homo sapiens
  source 1..23: mol_type = genomic DNA
gtcccgcggcctcaggggggcgg

SEQ ID NO: 6806 - DNA, 23 bp, Homo sapiens
  source 1..23: mol_type = genomic DNA
gtcccgcggcctcaggggggtgg

SEQ ID NO: 6807 - DNA, 23 bp, Homo sapiens
  source 1..23: mol_type = genomic DNA
gtcccgcggcctcagggggtcgg

SEQ ID NO: 6808 - DNA, 23 bp, Homo sapiens
  source 1..23: mol_type = genomic DNA
gtccctagaatactgatcagggg

SEQ ID NO: 6809 - DNA, 23 bp, Homo sapiens
  source 1..23: mol_type = genomic DNA
gtccctaggatagtgatcagggg

SEQ ID NO: 6810 - DNA, 23 bp, Homo sapiens
  source 1..23: mol_type = genomic DNA
gtccctgaggaccttcaggaggg

SEQ ID NO: 6811 - DNA, 23 bp, Homo sapiens
  source 1..23: mol_type = genomic DNA
gtccctggaatactgatcagggg

SEQ ID NO: 6812 - DNA, 23 bp, Homo sapiens
  source 1..23: mol_type = genomic DNA
gtccctgttagcataatgtgagg

SEQ ID NO: 6813 - DNA, 23 bp, Homo sapiens
  source 1..23: mol_type = genomic DNA
gtccctgttagcctaatgtgagg

SEQ ID NO: 6814 - DNA, 23 bp, Homo sapiens
  source 1..23: mol_type = genomic DNA
gtccgagatccacccccctgagg

SEQ ID NO: 6815 - DNA, 23 bp, Homo sapiens
  source 1..23: mol_type = genomic DNA
gtccgagatccgaccccctgagg

SEQ ID NO: 6816 - DNA, 23 bp, Homo sapiens
  source 1..23: mol_type = genomic DNA
gtccgagatccgcccccctgagg

SEQ ID NO: 6817 - DNA, 23 bp, Homo sapiens
  source 1..23: mol_type = genomic DNA
gtccgagatccgcctccctgagg

SEQ ID NO: 6818 - DNA, 23 bp, Homo sapiens
  source 1..23: mol_type = genomic DNA
gtccggccccgaccaacccgggg

SEQ ID NO: 6819 - DNA, 23 bp, Homo sapiens
  source 1..23: mol_type = genomic DNA
gtcctagcagttgtggtcatcgg

SEQ ID NO: 6820 - DNA, 23 bp, Homo sapiens
  source 1..23: mol_type = genomic DNA
gtcctccccatcccactgccagg

SEQ ID NO: 6821 - DNA, 23 bp, Homo sapiens
  source 1..23: mol_type = genomic DNA
gtcctccccatcccgctgccagg

SEQ ID NO: 6822 - DNA, 23 bp, Homo sapiens
  source 1..23: mol_type = genomic DNA
gtcctcgccatcccgctgccagg

SEQ ID NO: 6823 - DNA, 23 bp, Homo sapiens
  source 1..23: mol_type = genomic DNA
gtcctgcgcccccgccaggaggg

SEQ ID NO: 6824 - DNA, 23 bp, Homo sapiens
  source 1..23: mol_type = genomic DNA
gtcctgcgcccccgccaggcggg

SEQ ID NO: 6825 - DNA, 23 bp, Homo sapiens
  source 1..23: mol_type = genomic DNA
gtcctgcgcccccgccgggcggg

SEQ ID NO: 6826 - DNA, 23 bp, Homo sapiens
  source 1..23: mol_type = genomic DNA
gtcctgcgccctcgccgggaggg

SEQ ID NO: 6827 - DNA, 23 bp, Homo sapiens
  source 1..23: mol_type = genomic DNA
gtcctgcgccctcgccgggcggg

SEQ ID NO: 6828 - DNA, 23 bp, Homo sapiens
  source 1..23: mol_type = genomic DNA
gtcctgcgtccccgccgggcggg

SEQ ID NO: 6829 - DNA, 23 bp, Homo sapiens
  source 1..23: mol_type = genomic DNA
gtccttgggatattgtggttggg

SEQ ID NO: 6830 - DNA, 23 bp, Homo sapiens
  source 1..23: mol_type = genomic DNA
gtccttgggatattgtgtttggg

SEQ ID NO: 6831 - DNA, 23 bp, Homo sapiens
  source 1..23: mol_type = genomic DNA
gtcgaaatacctcatggagtggg

SEQ ID NO: 6832 - DNA, 23 bp, Homo sapiens
  source 1..23: mol_type = genomic DNA
gtcgggactggggcggggctcgg

SEQ ID NO: 6833 - DNA, 23 bp, Homo sapiens
  source 1..23: mol_type = genomic DNA
gtcggggccggacggggctcggg

SEQ ID NO: 6834 - DNA, 23 bp, Homo sapiens
  source 1..23: mol_type = genomic DNA
gtcggggccgggcagggcttggg

SEQ ID NO: 6835 - DNA, 23 bp, Homo sapiens
  source 1..23: mol_type = genomic DNA
gtcggggccgggcggggctcggg

SEQ ID NO: 6836 - DNA, 23 bp, Homo sapiens
  source 1..23: mol_type = genomic DNA
gtcggggcggggcggggctcggg

SEQ ID NO: 6837 - DNA, 23 bp, Homo sapiens
  source 1..23: mol_type = genomic DNA
gtcggggctgggcggggctcggg

SEQ ID NO: 6838 - DNA, 23 bp, Homo sapiens
  source 1..23: mol_type = genomic DNA
gtcggggctggggcggggctcgg

SEQ ID NO: 6839 - DNA, 23 bp, Homo sapiens
  source 1..23: mol_type = genomic DNA
gtcgtgagtatccaggaagaagg

SEQ ID NO: 6840 - DNA, 23 bp, Homo sapiens
  source 1..23: mol_type = genomic DNA
gtcgtgagtatccaggatgaagg

SEQ ID NO: 6841 - DNA, 23 bp, Homo sapiens
  source 1..23: mol_type = genomic DNA
gtctagagtgggcgggggggcgg

SEQ ID NO: 6842 - DNA, 23 bp, Homo sapiens
  source 1..23: mol_type = genomic DNA
gtctagagtgggtggggtggcgg

SEQ ID NO: 6843 - DNA, 23 bp, Homo sapiens
  source 1..23: mol_type = genomic DNA
gtctccccgtcccaatactccgg

SEQ ID NO: 6844 - DNA, 23 bp, Homo sapiens
  source 1..23: mol_type = genomic DNA
gtctcccggtcccaatactccgg

SEQ ID NO: 6845 - DNA, 23 bp, Homo sapiens
  source 1..23: mol_type = genomic DNA
gtctcctcgtcccaatactccgg

SEQ ID NO: 6846 - DNA, 23 bp, Homo sapiens
  source 1..23: mol_type = genomic DNA
gtctcctgagggctctgaccagg

SEQ ID NO: 6847 - DNA, 23 bp, Homo sapiens
  source 1..23: mol_type = genomic DNA
gtctcctgcgggctctgaccagg

SEQ ID NO: 6848 - DNA, 23 bp, Homo sapiens
  source 1..23: mol_type = genomic DNA
gtctcctggtcccaatactcagg

SEQ ID NO: 6849 - DNA, 23 bp, Homo sapiens
  source 1..23: mol_type = genomic DNA
gtctcctggtcccaatactccgg

SEQ ID NO: 6850 - DNA, 23 bp, Homo sapiens
  source 1..23: mol_type = genomic DNA
gtctcctgtgggctctgaccagg

SEQ ID NO: 6851 - DNA, 23 bp, Homo sapiens
  source 1..23: mol_type = genomic DNA
gtctcggagtcccgcggcttcgg

SEQ ID NO: 6852 - DNA, 23 bp, Homo sapiens
  source 1..23: mol_type = genomic DNA
gtctcggggtcccgcggcttcgg

SEQ ID NO: 6853 - DNA, 23 bp, Homo sapiens
  source 1..23: mol_type = genomic DNA
gtctgagatccaccccaaggtgg

SEQ ID NO: 6854 - DNA, 23 bp, Homo sapiens
  source 1..23: mol_type = genomic DNA
gtctgaggagactctgagtccgg

SEQ ID NO: 6855 - DNA, 23 bp, Homo sapiens
  source 1..23: mol_type = genomic DNA
gtctgaggagattctgagtccgg

SEQ ID NO: 6856 - DNA, 23 bp, Homo sapiens
  source 1..23: mol_type = genomic DNA
gtctgaggagattttgagtccgg

SEQ ID NO: 6857 - DNA, 23 bp, Homo sapiens
  source 1..23: mol_type = genomic DNA
gtctgcaggtcccaatactccgg

SEQ ID NO: 6858 - DNA, 23 bp, Homo sapiens
  source 1..23: mol_type = genomic DNA
gtctgccaagtgtgagaccctgg

SEQ ID NO: 6859 - DNA, 23 bp, Homo sapiens
  source 1..23: mol_type = genomic DNA
gtctggctgcgacgtggggccgg

SEQ ID NO: 6860 - DNA, 23 bp, Homo sapiens
  source 1..23: mol_type = genomic DNA
gtctggggagaatccgagtccgg

SEQ ID NO: 6861 - DNA, 23 bp, Homo sapiens
  source 1..23: mol_type = genomic DNA
gtctggggagaatctgagtccgg

SEQ ID NO: 6862 - DNA, 23 bp, Homo sapiens
  source 1..23: mol_type = genomic DNA
gtcttcccctccatttcctcagg

SEQ ID NO: 6863 - DNA, 23 bp, Homo sapiens
  source 1..23: mol_type = genomic DNA
gtcttgcgcccccgccaggcggg

SEQ ID NO: 6864 - DNA, 23 bp, Homo sapiens
  source 1..23: mol_type = genomic DNA
gtgaacctgcggaaactgcgcgg

SEQ ID NO: 6865 - DNA, 23 bp, Homo sapiens
  source 1..23: mol_type = genomic DNA
gtgaacctgcggaacctgcgcgg

SEQ ID NO: 6866 - DNA, 23 bp, Homo sapiens
  source 1..23: mol_type = genomic DNA
gtgaccagcctgagaatggacgg

SEQ ID NO: 6867 - DNA, 23 bp, Homo sapiens
  source 1..23: mol_type = genomic DNA
gtgaccccagcccggggcgcagg

SEQ ID NO: 6868 - DNA, 23 bp, Homo sapiens
  source 1..23: mol_type = genomic DNA
gtgaccccgcccgggggcgcagg

SEQ ID NO: 6869 - DNA, 23 bp, Homo sapiens
  source 1..23: mol_type = genomic DNA
gtgaccccggcccggggcgcagg

SEQ ID NO: 6870 - DNA, 23 bp, Homo sapiens
  source 1..23: mol_type = genomic DNA
gtgaccccggccgggggcgcagg

SEQ ID NO: 6871 - DNA, 23 bp, Homo sapiens
  source 1..23: mol_type = genomic DNA
gtgaccccggcctggggcgcagg

SEQ ID NO: 6872 - DNA, 23 bp, Homo sapiens
  source 1..23: mol_type = genomic DNA
gtgacctcatggtcagagatggg

SEQ ID NO: 6873 - DNA, 23 bp, Homo sapiens
  source 1..23: mol_type = genomic DNA
gtgacctgcgccccaggccgggg

SEQ ID NO: 6874 - DNA, 23 bp, Homo sapiens
  source 1..23: mol_type = genomic DNA
gtgacctgcgcccccggccgggg

SEQ ID NO: 6875 - DNA, 23 bp, Homo sapiens
  source 1..23: mol_type = genomic DNA
gtgacctgcgcccccgggcgggg

SEQ ID NO: 6876 - DNA, 23 bp, Homo sapiens
  source 1..23: mol_type = genomic DNA
gtgacctgcgccccgggccgggg

SEQ ID NO: 6877 - DNA, 23 bp, Homo sapiens
  source 1..23: mol_type = genomic DNA
gtgacctgcgccccgggctgggg

SEQ ID NO: 6878 - DNA, 23 bp, Homo sapiens
  source 1..23: mol_type = genomic DNA
gtgacctggcccgtccgtggggg

SEQ ID NO: 6879 - DNA, 23 bp, Homo sapiens
  source 1..23: mol_type = genomic DNA
gtgactggggacttcagaaccgg

SEQ ID NO: 6880 - DNA, 23 bp, Homo sapiens
  source 1..23: mol_type = genomic DNA
gtgactggggactttagaaccgg

SEQ ID NO: 6881 - DNA, 23 bp, Homo sapiens
  source 1..23: mol_type = genomic DNA
gtgagacagctgccttgtgtggg

SEQ ID NO: 6882 - DNA, 23 bp, Homo sapiens
  source 1..23: mol_type = genomic DNA
gtgagcctgcggaacctgcgcgg

SEQ ID NO: 6883 - DNA, 23 bp, Homo sapiens
  source 1..23: mol_type = genomic DNA
gtgagtcatatgcgtcctggggg

SEQ ID NO: 6884 - DNA, 23 bp, Homo sapiens
  source 1..23: mol_type = genomic DNA
gtgagtcatatgcgtcttggggg

SEQ ID NO: 6885 - DNA, 23 bp, Homo sapiens
  source 1..23: mol_type = genomic DNA
gtgagtcatatgcgttttggggg

SEQ ID NO: 6886 - DNA, 23 bp, Homo sapiens
  source 1..23: mol_type = genomic DNA
gtgagtcatatgtgtcttggggg

SEQ ID NO: 6887 - DNA, 23 bp, Homo sapiens
  source 1..23: mol_type = genomic DNA
gtgagtccgggtgggtgactggg

SEQ ID NO: 6888 - DNA, 23 bp, Homo sapiens
  source 1..23: mol_type = genomic DNA
gtgatgtatggctgcgacgtggg

SEQ ID NO: 6889 - DNA, 23 bp, Homo sapiens
  source 1..23: mol_type = genomic DNA
gtgcccgcggctccatcctctgg

SEQ ID NO: 6890 - DNA, 23 bp, Homo sapiens
  source 1..23: mol_type = genomic DNA
gtgcgaggttgggagggaaacgg

SEQ ID NO: 6891 - DNA, 23 bp, Homo sapiens
  source 1..23: mol_type = genomic DNA
gtgcgggatcgggagggaaatgg

SEQ ID NO: 6892 - DNA, 23 bp, Homo sapiens
  source 1..23: mol_type = genomic DNA
gtgcggggtcggcagggaaatgg

SEQ ID NO: 6893 - DNA, 23 bp, Homo sapiens
  source 1..23: mol_type = genomic DNA
gtgcggggtcgggagggaaacgg

SEQ ID NO: 6894 - DNA, 23 bp, Homo sapiens
  source 1..23: mol_type = genomic DNA
gtgcggggtcgggagggaaatgg

SEQ ID NO: 6895 - DNA, 23 bp, Homo sapiens
  source 1..23: mol_type = genomic DNA
gtgcggggttaggagggaaacgg

SEQ ID NO: 6896 - DNA, 23 bp, Homo sapiens
  source 1..23: mol_type = genomic DNA
gtgcggggttgggagggaaacgg

SEQ ID NO: 6897 - DNA, 23 bp, Homo sapiens
  source 1..23: mol_type = genomic DNA
gtgcggggttgggagggaagcgg

SEQ ID NO: 6898 - DNA, 23 bp, Homo sapiens
  source 1..23: mol_type = genomic DNA
gtgcggggttgggagggaatcgg

SEQ ID NO: 6899 - DNA, 23 bp, Homo sapiens
  source 1..23: mol_type = genomic DNA
gtgcgtggggactttagaactgg

SEQ ID NO: 6900 - DNA, 23 bp, Homo sapiens
  source 1..23: mol_type = genomic DNA
gtgctagcacacagggtcccagg

SEQ ID NO: 6901 - DNA, 23 bp, Homo sapiens
  source 1..23: mol_type = genomic DNA
gtgctggcacacagggtcccagg

SEQ ID NO: 6902 - DNA, 23 bp, Homo sapiens
  source 1..23: mol_type = genomic DNA
gtgcttccagtaacaaggcgggg

SEQ ID NO: 6903 - DNA, 23 bp, Homo sapiens
  source 1..23: mol_type = genomic DNA
gtgcttccagtaacgaggtgggg

SEQ ID NO: 6904 - DNA, 23 bp, Homo sapiens
  source 1..23: mol_type = genomic DNA
gtgcttcccaggaatgagacagg

SEQ ID NO: 6905 - DNA, 23 bp, Homo sapiens
  source 1..23: mol_type = genomic DNA
gtgcttcccagtaacgaggcagg

SEQ ID NO: 6906 - DNA, 23 bp, Homo sapiens
  source 1..23: mol_type = genomic DNA
gtgcttcccagtaatgagacagg

SEQ ID NO: 6907 - DNA, 23 bp, Homo sapiens
  source 1..23: mol_type = genomic DNA
gtggaaatacctcatggagtggg

SEQ ID NO: 6908 - DNA, 23 bp, Homo sapiens
  source 1..23: mol_type = genomic DNA
gtggacacagctgtgctatgggg

SEQ ID NO: 6909 - DNA, 23 bp, Homo sapiens
  source 1..23: mol_type = genomic DNA
gtggacctggggaccctgcgcgg

SEQ ID NO: 6910 - DNA, 23 bp, Homo sapiens
  source 1..23: mol_type = genomic DNA
gtggacgcagctgtgctatgggg

SEQ ID NO: 6911 - DNA, 23 bp, Homo sapiens
  source 1..23: mol_type = genomic DNA
gtggactgggaagacggctctgg

SEQ ID NO: 6912 - DNA, 23 bp, Homo sapiens
  source 1..23: mol_type = genomic DNA
gtggactgggaagatggctctgg

SEQ ID NO: 6913 - DNA, 23 bp, Homo sapiens
  source 1..23: mol_type = genomic DNA
gtggagaaggggtgaaaggtggg

SEQ ID NO: 6914 - DNA, 23 bp, Homo sapiens
  source 1..23: mol_type = genomic DNA
gtggagaaggggtgaagggtggg

SEQ ID NO: 6915 - DNA, 23 bp, Homo sapiens
  source 1..23: mol_type = genomic DNA
gtggatagagcaagaggggccgg

SEQ ID NO: 6916 - DNA, 23 bp, Homo sapiens
  source 1..23: mol_type = genomic DNA
gtggatagagcaggaggagccgg

SEQ ID NO: 6917 - DNA, 23 bp, Homo sapiens
  source 1..23: mol_type = genomic DNA
gtggatagagcaggaggggccgg

SEQ ID NO: 6918 - DNA, 23 bp, Homo sapiens
  source 1..23: mol_type = genomic DNA
gtggatagagcaggagggtccgg

SEQ ID NO: 6919 - DNA, 23 bp, Homo sapiens
  source 1..23: mol_type = genomic DNA
gtggatgtacggctgcgacctgg

SEQ ID NO: 6920 - DNA, 23 bp, Homo sapiens
  source 1..23: mol_type = genomic DNA
gtggatgtatggctgcgacctgg

SEQ ID NO: 6921 - DNA, 23 bp, Homo sapiens
  source 1..23: mol_type = genomic DNA
gtggatgtatggctgcgacgtgg

SEQ ID NO: 6922 - DNA, 23 bp, Homo sapiens
  source 1..23: mol_type = genomic DNA
gtggatgtgtggctgcgacctgg

SEQ ID NO: 6923 - DNA, 23 bp, Homo sapiens
  source 1..23: mol_type = genomic DNA
gtggatgtttggctgcgacctgg

SEQ ID NO: 6924 - DNA, 23 bp, Homo sapiens
  source 1..23: mol_type = genomic DNA
gtggattgggaagatggctctgg

SEQ ID NO: 6925 - DNA, 23 bp, Homo sapiens
  source 1..23: mol_type = genomic DNA
gtggcaggtctgggggtgggtgg

SEQ ID NO: 6926 - DNA, 23 bp, Homo sapiens
  source 1..23: mol_type = genomic DNA
gtggcctcatggtcagagacggg

SEQ ID NO: 6927 - DNA, 23 bp, Homo sapiens
  source 1..23: mol_type = genomic DNA
gtggcctcatggtcagagagggg

SEQ ID NO: 6928 - DNA, 23 bp, Homo sapiens
  source 1..23: mol_type = genomic DNA
gtggcctcatggtcagagatggg

SEQ ID NO: 6929 - DNA, 23 bp, Homo sapiens
  source 1..23: mol_type = genomic DNA
gtggcgggtctggggcggggtgg

SEQ ID NO: 6930 - DNA, 23 bp, Homo sapiens
  source 1..23: mol_type = genomic DNA
gtggcgggtctgggggtgggtgg

SEQ ID NO: 6931 - DNA, 23 bp, Homo sapiens
  source 1..23: mol_type = genomic DNA
gtggctagaggaggaattgtggg

SEQ ID NO: 6932 - DNA, 23 bp, Homo sapiens
  source 1..23: mol_type = genomic DNA
gtggctgtggtggtgccttctgg

SEQ ID NO: 6933 - DNA, 23 bp, Homo sapiens
  source 1..23: mol_type = genomic DNA
gtgggacaagaggaattatgggg

SEQ ID NO: 6934 - DNA, 23 bp, Homo sapiens
  source 1..23: mol_type = genomic DNA
gtgggacaggaggaattaggggg

SEQ ID NO: 6935 - DNA, 23 bp, Homo sapiens
  source 1..23: mol_type = genomic DNA
gtgggacaggaggaattatgggg

SEQ ID NO: 6936 - DNA, 23 bp, Homo sapiens
  source 1..23: mol_type = genomic DNA
gtgggagacggcccatgaggcgg

SEQ ID NO: 6937 - DNA, 23 bp, Homo sapiens
  source 1..23: mol_type = genomic DNA
gtgggagcctggggcaaggaggg

SEQ ID NO: 6938 - DNA, 23 bp, Homo sapiens
  source 1..23: mol_type = genomic DNA
gtgggagcctgggggagaggagg

SEQ ID NO: 6939 - DNA, 23 bp, Homo sapiens
  source 1..23: mol_type = genomic DNA
gtgggagcctgggggccaggagg

SEQ ID NO: 6940 - DNA, 23 bp, Homo sapiens
  source 1..23: mol_type = genomic DNA
gtgggagcctgggggcgaggagg

SEQ ID NO: 6941 - DNA, 23 bp, Homo sapiens
  source 1..23: mol_type = genomic DNA
gtgggagcctgggggtgaggagg

SEQ ID NO: 6942 - DNA, 23 bp, Homo sapiens
  source 1..23: mol_type = genomic DNA
gtgggaggcggcccatgaggcgg

SEQ ID NO: 6943 - DNA, 23 bp, Homo sapiens
  source 1..23: mol_type = genomic DNA
gtgggaggcggcccatgcggcgg

SEQ ID NO: 6944 - DNA, 23 bp, Homo sapiens
  source 1..23: mol_type = genomic DNA
gtgggaggcggcccatgtggcgg

SEQ ID NO: 6945 - DNA, 23 bp, Homo sapiens
  source 1..23: mol_type = genomic DNA
gtgggaggcggcccgtacggcgg

SEQ ID NO: 6946 - DNA, 23 bp, Homo sapiens
  source 1..23: mol_type = genomic DNA
gtgggaggcggcccgtcgggcgg

SEQ ID NO: 6947 - DNA, 23 bp, Homo sapiens
  source 1..23: mol_type = genomic DNA
gtgggaggcggcccgtgaggcgg

SEQ ID NO: 6948 - DNA, 23 bp, Homo sapiens
  source 1..23: mol_type = genomic DNA
gtgggaggcggcccgtgcggcgg

SEQ ID NO: 6949 - DNA, 23 bp, Homo sapiens
  source 1..23: mol_type = genomic DNA
gtgggaggcggcccgtgtggcgg

SEQ ID NO: 6950 - DNA, 23 bp, Homo sapiens
  source 1..23: mol_type = genomic DNA
gtgggaggcggcccgttgggcgg

SEQ ID NO: 6951 - DNA, 23 bp, Homo sapiens
  source 1..23: mol_type = genomic DNA
gtgggaggcggtccatgcggcgg

SEQ ID NO: 6952 - DNA, 23 bp, Homo sapiens
  source 1..23: mol_type = genomic DNA
gtgggcgggggggcggggagggg

SEQ ID NO: 6953 - DNA, 23 bp, Homo sapiens
  source 1..23: mol_type = genomic DNA
gtgggcggggggggcggggaggg

SEQ ID NO: 6954 - DNA, 23 bp, Homo sapiens
  source 1..23: mol_type = genomic DNA
gtgggcgggggggggtggggtgg

SEQ ID NO: 6955 - DNA, 23 bp, Homo sapiens
  source 1..23: mol_type = genomic DNA
gtgggcggggggggtggggtggg

SEQ ID NO: 6956 - DNA, 23 bp, Homo sapiens
  source 1..23: mol_type = genomic DNA
gtgggctgggaagacagctctgg

SEQ ID NO: 6957 - DNA, 23 bp, Homo sapiens
  source 1..23: mol_type = genomic DNA
gtgggctgggaagacggctctgg

SEQ ID NO: 6958 - DNA, 23 bp, Homo sapiens
  source 1..23: mol_type = genomic DNA
gtgggctgggaagatggccctgg

SEQ ID NO: 6959 - DNA, 23 bp, Homo sapiens
  source 1..23: mol_type = genomic DNA
gtgggctgggaagatggctctgg

SEQ ID NO: 6960 - DNA, 23 bp, Homo sapiens
  source 1..23: mol_type = genomic DNA
gtggggaaaccgcctctgcgggg

SEQ ID NO: 6961 - DNA, 23 bp, Homo sapiens
  source 1..23: mol_type = genomic DNA
gtggggaaaggcctgggtaatgg

SEQ ID NO: 6962 - DNA, 23 bp, Homo sapiens
  source 1..23: mol_type = genomic DNA
gtggggaagggatgaagggtggg

SEQ ID NO: 6963 - DNA, 23 bp, Homo sapiens
  source 1..23: mol_type = genomic DNA
gtggggaaggggtgaagggtggg

SEQ ID NO: 6964 - DNA, 23 bp, Homo sapiens
  source 1..23: mol_type = genomic DNA
gtggggcacacttctacctgggg

SEQ ID NO: 6965 - DNA, 23 bp, Homo sapiens
  source 1..23: mol_type = genomic DNA
gtgggggatggggaggggtcggg

SEQ ID NO: 6966 - DNA, 23 bp, Homo sapiens
  source 1..23: mol_type = genomic DNA
gtggggtggggagggggcagagg

SEQ ID NO: 6967 - DNA, 23 bp, Homo sapiens
  source 1..23: mol_type = genomic DNA
gtgggtcacatgtgtctttgggg

SEQ ID NO: 6968 - DNA, 23 bp, Homo sapiens
  source 1..23: mol_type = genomic DNA
gtgggtcacgtgtgtctttgggg

SEQ ID NO: 6969 - DNA, 23 bp, Homo sapiens
  source 1..23: mol_type = genomic DNA
gtgggtcatatgtgtcttggggg

SEQ ID NO: 6970 - DNA, 23 bp, Homo sapiens
  source 1..23: mol_type = genomic DNA
gtgggtggagcaggaggggccgg

SEQ ID NO: 6971 - DNA, 23 bp, Homo sapiens
  source 1..23: mol_type = genomic DNA
gtgggtggggcagaggggaaagg

SEQ ID NO: 6972 - DNA, 23 bp, Homo sapiens
  source 1..23: mol_type = genomic DNA
gtgggtggggcagtggggaaagg

SEQ ID NO: 6973 - DNA, 23 bp, Homo sapiens
  source 1..23: mol_type = genomic DNA
gtgggtgggggtggcgggtctgg

SEQ ID NO: 6974 - DNA, 23 bp, Homo sapiens
  source 1..23: mol_type = genomic DNA
gtgggtggggtggcaggtctggg

SEQ ID NO: 6975 - DNA, 23 bp, Homo sapiens
  source 1..23: mol_type = genomic DNA
gtgggtggggtggcgggtctggg

SEQ ID NO: 6976 - DNA, 23 bp, Homo sapiens
  source 1..23: mol_type = genomic DNA
gtggtcgggggtggggcagaggg

SEQ ID NO: 6977 - DNA, 23 bp, Homo sapiens
  source 1..23: mol_type = genomic DNA
gtggtctggggtggggcagaggg

SEQ ID NO: 6978 - DNA, 23 bp, Homo sapiens
  source 1..23: mol_type = genomic DNA
gtggtgagtcatatgcgtcctgg

SEQ ID NO: 6979 - DNA, 23 bp, Homo sapiens
  source 1..23: mol_type = genomic DNA
gtggtgagtcatatgcgtcttgg

SEQ ID NO: 6980 - DNA, 23 bp, Homo sapiens
  source 1..23: mol_type = genomic DNA
gtggtgagtcatatgcgttttgg

SEQ ID NO: 6981 - DNA, 23 bp, Homo sapiens
  source 1..23: mol_type = genomic DNA
gtggtgagtcatatgtgtcttgg

SEQ ID NO: 6982 - DNA, 23 bp, Homo sapiens
  source 1..23: mol_type = genomic DNA
gtggtgggtcatatgtgtcttgg

SEQ ID NO: 6983 - DNA, 23 bp, Homo sapiens
  source 1..23: mol_type = genomic DNA
gtgtccctcacagcttgtaaagg

SEQ ID NO: 6984 - DNA, 23 bp, Homo sapiens
  source 1..23: mol_type = genomic DNA
gtgtctctcacagcttgaaaagg

SEQ ID NO: 6985 - DNA, 23 bp, Homo sapiens
  source 1..23: mol_type = genomic DNA
gtgtctctcacagcttgtaaagg

SEQ ID NO: 6986 - DNA, 23 bp, Homo sapiens
  source 1..23: mol_type = genomic DNA
gtgtcttgggggcgtctgtcagg

SEQ ID NO: 6987 - DNA, 23 bp, Homo sapiens
  source 1..23: mol_type = genomic DNA
gtgtcttggggggggtctgacgg

SEQ ID NO: 6988 - DNA, 23 bp, Homo sapiens
  source 1..23: mol_type = genomic DNA
gtgtcttgggggggtctgacggg

SEQ ID NO: 6989 - DNA, 23 bp, Homo sapiens
  source 1..23: mol_type = genomic DNA
gtgtctttgggcgttctgacggg

SEQ ID NO: 6990 - DNA, 23 bp, Homo sapiens
  source 1..23: mol_type = genomic DNA
gtgtctttggggggtctgatggg

SEQ ID NO: 6991 - DNA, 23 bp, Homo sapiens
  source 1..23: mol_type = genomic DNA
gtgtctttgggggttctgacggg

SEQ ID NO: 6992 - DNA, 23 bp, Homo sapiens
  source 1..23: mol_type = genomic DNA
gtgtctttgggtgttctgacggg

SEQ ID NO: 6993 - DNA, 23 bp, Homo sapiens
  source 1..23: mol_type = genomic DNA
gtgtctttgggtgttctgatggg

SEQ ID NO: 6994 - DNA, 23 bp, Homo sapiens
  source 1..23: mol_type = genomic DNA
gtgtgactgcagacccagggcgg

SEQ ID NO: 6995 - DNA, 23 bp, Homo sapiens
  source 1..23: mol_type = genomic DNA
gtgtgccctgcctcgttactggg

SEQ ID NO: 6996 - DNA, 23 bp, Homo sapiens
  source 1..23: mol_type = genomic DNA
gtgtggctgcgacgtggggtcgg

SEQ ID NO: 6997 - DNA, 23 bp, Homo sapiens
  source 1..23: mol_type = genomic DNA
gtgtgtaggaggaagagctcagg

SEQ ID NO: 6998 - DNA, 23 bp, Homo sapiens
  source 1..23: mol_type = genomic DNA
gtgttccctgcatcattactggg

SEQ ID NO: 6999 - DNA, 23 bp, Homo sapiens
  source 1..23: mol_type = genomic DNA
gtgttccctgcctcattactggg

SEQ ID NO: 7000 - DNA, 23 bp, Homo sapiens
  source 1..23: mol_type = genomic DNA
gtgttccggtcccaatactccgg

SEQ ID NO: 7001 - DNA, 23 bp, Homo sapiens
  source 1..23: mol_type = genomic DNA
gtgttccggtcccaatattccgg

SEQ ID NO: 7002 - DNA, 23 bp, Homo sapiens
  source 1..23: mol_type = genomic DNA
gtgtttcctgatcctgccctggg

SEQ ID NO: 7003 - DNA, 23 bp, Homo sapiens
  source 1..23: mol_type = genomic DNA
gtgtttcctgatcctgccttggg

SEQ ID NO: 7004 - DNA, 23 bp, Homo sapiens
  source 1..23: mol_type = genomic DNA
gttagcataatatgaggagttgg

SEQ ID NO: 7005 - DNA, 23 bp, Homo sapiens
  source 1..23: mol_type = genomic DNA
gttagcataatgtgaggaggtgg

SEQ ID NO: 7006 - DNA, 23 bp, Homo sapiens
  source 1..23: mol_type = genomic DNA
gttagcctaatgtgaggaggtgg

SEQ ID NO: 7007 - DNA, 23 bp, Homo sapiens
  source 1..23: mol_type = genomic DNA
gttcaggtagggaaggggtgagg

SEQ ID NO: 7008 - DNA, 23 bp, Homo sapiens
  source 1..23: mol_type = genomic DNA
gttcatgtaggcataatgtgagg

SEQ ID NO: 7009 - DNA, 23 bp, Homo sapiens
  source 1..23: mol_type = genomic DNA
gttccagagaggtggggctgagg

SEQ ID NO: 7010 - DNA, 23 bp, Homo sapiens
  source 1..23: mol_type = genomic DNA
gttcctgttagcataatatgagg

SEQ ID NO: 7011 - DNA, 23 bp, Homo sapiens
  source 1..23: mol_type = genomic DNA
gttcctgttagcataatgtgagg

SEQ ID NO: 7012 - DNA, 23 bp, Homo sapiens
  source 1..23: mol_type = genomic DNA
gttcgtgtaggcataatgtgagg

SEQ ID NO: 7013 - DNA, 23 bp, Homo sapiens
  source 1..23: mol_type = genomic DNA
gttctctcggtaagtctgcgcgg

SEQ ID NO: 7014 - DNA, 23 bp, Homo sapiens
  source 1..23: mol_type = genomic DNA
gttctggcacacagggtcccagg

SEQ ID NO: 7015 - DNA, 23 bp, Homo sapiens
  source 1..23: mol_type = genomic DNA
gttcttgtaggcataatgtgagg

SEQ ID NO: 7016 - DNA, 23 bp, Homo sapiens
  source 1..23: mol_type = genomic DNA
gttgaggccaaaatccccgcggg

SEQ ID NO: 7017 - DNA, 23 bp, Homo sapiens
  source 1..23: mol_type = genomic DNA
gttgcagagaggtggggctgagg

SEQ ID NO: 7018 - DNA, 23 bp, Homo sapiens
  source 1..23: mol_type = genomic DNA
gttggaggcggcccgtgaggcgg

SEQ ID NO: 7019 - DNA, 23 bp, Homo sapiens
  source 1..23: mol_type = genomic DNA
gttggaggcggcccgtgcggcgg

SEQ ID NO: 7020 - DNA, 23 bp, Homo sapiens
  source 1..23: mol_type = genomic DNA
gttggaggcggcccgtgtggcgg

SEQ ID NO: 7021 - DNA, 23 bp, Homo sapiens
  source 1..23: mol_type = genomic DNA
gttgggagaagtgaaactcaggg

SEQ ID NO: 7022 - DNA, 23 bp, Homo sapiens
  source 1..23: mol_type = genomic DNA
gttgggagggaaacggcctctgg

SEQ ID NO: 7023 - DNA, 23 bp, Homo sapiens
  source 1..23: mol_type = genomic DNA
gttggggaatccccaaggctggg

SEQ ID NO: 7024 - DNA, 23 bp, Homo sapiens
  source 1..23: mol_type = genomic DNA
gtttaggccaaaaatccccccgg

SEQ ID NO: 7025 - DNA, 23 bp, Homo sapiens
  source 1..23: mol_type = genomic DNA
gtttaggccaaaaattcccccgg

SEQ ID NO: 7026 - DNA, 23 bp, Homo sapiens
  source 1..23: mol_type = genomic DNA
gtttaggccaaaatccccgcggg

SEQ ID NO: 7027 - DNA, 23 bp, Homo sapiens
  source 1..23: mol_type = genomic DNA
gtttggctgcgacctggggccgg

SEQ ID NO: 7028 - DNA, 23 bp, Homo sapiens
  source 1..23: mol_type = genomic DNA
gtttggctgcgacgtggggccgg

SEQ ID NO: 7029 - DNA, 23 bp, Homo sapiens
  source 1..23: mol_type = genomic DNA
gtttggctgcgacgtggggtcgg

SEQ ID NO: 7030 - DNA, 23 bp, Homo sapiens
  source 1..23: mol_type = genomic DNA
gttttcccgagtttcctctgagg

SEQ ID NO: 7031 - DNA, 23 bp, Homo sapiens
  source 1..23: mol_type = genomic DNA
gttttcctgagtttcctctgagg

SEQ ID NO: 7032 - DNA, 23 bp, Homo sapiens
  source 1..23: mol_type = genomic DNA
gttttcctgagtttcttctgagg

SEQ ID NO: 7033 - DNA, 23 bp, Homo sapiens
  source 1..23: mol_type = genomic DNA
taaaatctctgaaggaatgacgg

SEQ ID NO: 7034 - DNA, 23 bp, Homo sapiens
  source 1..23: mol_type = genomic DNA
taaaatctctgaaggagtgacgg

SEQ ID NO: 7035 - DNA, 23 bp, Homo sapiens
  source 1..23: mol_type = genomic DNA
taaaatctctgacggaatgacgg

SEQ ID NO: 7036 - DNA, 23 bp, Homo sapiens
  source 1..23: mol_type = genomic DNA
taaagcacctgtgacaatgaagg

SEQ ID NO: 7037 - DNA, 23 bp, Homo sapiens
  source 1..23: mol_type = genomic DNA
taaagcacctgttaaaatgaagg

SEQ ID NO: 7038 - DNA, 23 bp, Homo sapiens
  source 1..23: mol_type = genomic DNA
taaagcccgcacgcacccaccgg

SEQ ID NO: 7039 - DNA, 23 bp, Homo sapiens
  source 1..23: mol_type = genomic DNA
taaagtccgcacgcacccaccgg

SEQ ID NO: 7040 - DNA, 23 bp, Homo sapiens
  source 1..23: mol_type = genomic DNA
taaggcgcctgggcctctcccgg

SEQ ID NO: 7041 - DNA, 23 bp, Homo sapiens
  source 1..23: mol_type = genomic DNA
taagggataaaaatctctgaagg

SEQ ID NO: 7042 - DNA, 23 bp, Homo sapiens
  source 1..23: mol_type = genomic DNA
taatcttctattccctgagaagg

SEQ ID NO: 7043 - DNA, 23 bp, Homo sapiens
  source 1..23: mol_type = genomic DNA
taatcttctattccctgaggagg

SEQ ID NO: 7044 - DNA, 23 bp, Homo sapiens
  source 1..23: mol_type = genomic DNA
taatgtatggctgcgacgtgggg

SEQ ID NO: 7045 - DNA, 23 bp, Homo sapiens
  source 1..23: mol_type = genomic DNA
taattgtcctagagagaagaggg

SEQ ID NO: 7046 - DNA, 23 bp, Homo sapiens
  source 1..23: mol_type = genomic DNA
taattgtcctagagagcagacgg

SEQ ID NO: 7047 - DNA, 23 bp, Homo sapiens
  source 1..23: mol_type = genomic DNA
taattgtcctagagagcagaggg

SEQ ID NO: 7048 - DNA, 23 bp, Homo sapiens
  source 1..23: mol_type = genomic DNA
taattgtctagagagaagagggg

SEQ ID NO: 7049 - DNA, 23 bp, Homo sapiens
  source 1..23: mol_type = genomic DNA
tacaccgccatgtcccggcccgg

SEQ ID NO: 7050 - DNA, 23 bp, Homo sapiens
  source 1..23: mol_type = genomic DNA
tacaccgccatgtcccggcctgg

SEQ ID NO: 7051 - DNA, 23 bp, Homo sapiens
  source 1..23: mol_type = genomic DNA
tacaccgccgtgtcccggcccgg

SEQ ID NO: 7052 - DNA, 23 bp, Homo sapiens
  source 1..23: mol_type = genomic DNA
tacaccgctgtgtcccggcccgg

SEQ ID NO: 7053 - DNA, 23 bp, Homo sapiens
  source 1..23: mol_type = genomic DNA
tacacctccatgtcccggcccgg

SEQ ID NO: 7054 - DNA, 23 bp, Homo sapiens
  source 1..23: mol_type = genomic DNA
tacacctccgtgtcccggcccgg

SEQ ID NO: 7055 - DNA, 23 bp, Homo sapiens
  source 1..23: mol_type = genomic DNA
tacacttccgtgtcccggcccgg

SEQ ID NO: 7056 - DNA, 23 bp, Homo sapiens
  source 1..23: mol_type = genomic DNA
tacagacccaaggcaggatcagg

SEQ ID NO: 7057 - DNA, 23 bp, Homo sapiens
  source 1..23: mol_type = genomic DNA
tacagacccagggcaggatcagg

SEQ ID NO: 7058 - DNA, 23 bp, Homo sapiens
  source 1..23: mol_type = genomic DNA
tacaggatctggaacccaggagg

SEQ ID NO: 7059 - DNA, 23 bp, Homo sapiens
  source 1..23: mol_type = genomic DNA
taccaccaggacgcctacgacgg

SEQ ID NO: 7060 - DNA, 23 bp, Homo sapiens
  source 1..23: mol_type = genomic DNA
taccagcaggacgcctacgacgg

SEQ ID NO: 7061 - DNA, 23 bp, Homo sapiens
  source 1..23: mol_type = genomic DNA
taccagcaggacgcttacgacgg

SEQ ID NO: 7062 - DNA, 23 bp, Homo sapiens
  source 1..23: mol_type = genomic DNA
taccagcagtcacaagtcacagg

SEQ ID NO: 7063 - DNA, 23 bp, Homo sapiens
  source 1..23: mol_type = genomic DNA
tacccaatgggagtgggaagtgg

SEQ ID NO: 7064 - DNA, 23 bp, Homo sapiens
  source 1..23: mol_type = genomic DNA
taccggcaggacgcctacgacgg

SEQ ID NO: 7065 - DNA, 23 bp, Homo sapiens
  source 1..23: mol_type = genomic DNA
taccggcaggacgcttacgacgg

SEQ ID NO: 7066 - DNA, 23 bp, Homo sapiens
  source 1..23: mol_type = genomic DNA
tacctcatggagtgagagcctgg

SEQ ID NO: 7067 - DNA, 23 bp, Homo sapiens
  source 1..23: mol_type = genomic DNA
tacctcatggagtgggagactgg

SEQ ID NO: 7068 - DNA, 23 bp, Homo sapiens
  source 1..23: mol_type = genomic DNA
tacctcatggagtgggagcctgg

SEQ ID NO: 7069 - DNA, 23 bp, Homo sapiens
  source 1..23: mol_type = genomic DNA
tacctcatggattgggagcctgg

SEQ ID NO: 7070 - DNA, 23 bp, Homo sapiens
  source 1..23: mol_type = genomic DNA
tacgactgcagacccagggcagg

SEQ ID NO: 7071 - DNA, 23 bp, Homo sapiens
  source 1..23: mol_type = genomic DNA
tactacaaccagagcgaggacgg

SEQ ID NO: 7072 - DNA, 23 bp, Homo sapiens
  source 1..23: mol_type = genomic DNA
tactacaaccagagcgaggccgg

SEQ ID NO: 7073 - DNA, 23 bp, Homo sapiens
  source 1..23: mol_type = genomic DNA
tacttcaagtcacaaagggaagg

SEQ ID NO: 7074 - DNA, 23 bp, Homo sapiens
  source 1..23: mol_type = genomic DNA
tacttcatggagtgggagcctgg

SEQ ID NO: 7075 - DNA, 23 bp, Homo sapiens
  source 1..23: mol_type = genomic DNA
tacttctggaaattccttttggg

SEQ ID NO: 7076 - DNA, 23 bp, Homo sapiens
  source 1..23: mol_type = genomic DNA
tagaggaggaattgtgaggtggg

SEQ ID NO: 7077 - DNA, 23 bp, Homo sapiens
  source 1..23: mol_type = genomic DNA
tagaggaggaattgtggggtggg

SEQ ID NO: 7078 - DNA, 23 bp, Homo sapiens
  source 1..23: mol_type = genomic DNA
tagagtgggcggggggggcgggg

SEQ ID NO: 7079 - DNA, 23 bp, Homo sapiens
  source 1..23: mol_type = genomic DNA
tagagtgggcgggggggggtggg

SEQ ID NO: 7080 - DNA, 23 bp, Homo sapiens
  source 1..23: mol_type = genomic DNA
tagagtgggcggggggggtgggg

SEQ ID NO: 7081 - DNA, 23 bp, Homo sapiens
  source 1..23: mol_type = genomic DNA
tagcacacagggtcccaggctgg

SEQ ID NO: 7082 - DNA, 23 bp, Homo sapiens
  source 1..23: mol_type = genomic DNA
tagcccacggcgatgaagcgggg

SEQ ID NO: 7083 - DNA, 23 bp, Homo sapiens
  source 1..23: mol_type = genomic DNA
tagcccacggtgatgaagcgggg

SEQ ID NO: 7084 - DNA, 23 bp, Homo sapiens
  source 1..23: mol_type = genomic DNA
tagcccactgagatgaagcgggg

SEQ ID NO: 7085 - DNA, 23 bp, Homo sapiens
  source 1..23: mol_type = genomic DNA
tagcccactgcaatgaagcgggg

SEQ ID NO: 7086 - DNA, 23 bp, Homo sapiens
  source 1..23: mol_type = genomic DNA
tagcccactgcgatgaagcgggg

SEQ ID NO: 7087 - DNA, 23 bp, Homo sapiens
  source 1..23: mol_type = genomic DNA
tagcccactgcgatgaagtgggg

SEQ ID NO: 7088 - DNA, 23 bp, Homo sapiens
  source 1..23: mol_type = genomic DNA
tagcggtgaccacagctccaagg

SEQ ID NO: 7089 - DNA, 23 bp, Homo sapiens
  source 1..23: mol_type = genomic DNA
taggaggaagagctcaggtaggg

SEQ ID NO: 7090 - DNA, 23 bp, Homo sapiens
  source 1..23: mol_type = genomic DNA
taggaggaagagttcaggtaggg

SEQ ID NO: 7091 - DNA, 23 bp, Homo sapiens
  source 1..23: mol_type = genomic DNA
taggagggaaacggcctctgcgg

SEQ ID NO: 7092 - DNA, 23 bp, Homo sapiens
  source 1..23: mol_type = genomic DNA
taggcataatgtgaggaggtggg

SEQ ID NO: 7093 - DNA, 23 bp, Homo sapiens
  source 1..23: mol_type = genomic DNA
taggcgacccgggccgtccgtgg

SEQ ID NO: 7094 - DNA, 23 bp, Homo sapiens
  source 1..23: mol_type = genomic DNA
taggctgggaagatggctctggg

SEQ ID NO: 7095 - DNA, 23 bp, Homo sapiens
  source 1..23: mol_type = genomic DNA
tagggaaggggtgaagagcgggg

SEQ ID NO: 7096 - DNA, 23 bp, Homo sapiens
  source 1..23: mol_type = genomic DNA
tagggaaggggtgaggagtgggg

SEQ ID NO: 7097 - DNA, 23 bp, Homo sapiens
  source 1..23: mol_type = genomic DNA
tagggaaggggtgaggggtgggg

SEQ ID NO: 7098 - DNA, 23 bp, Homo sapiens
  source 1..23: mol_type = genomic DNA
tagttctggaaacttctcttggg

SEQ ID NO: 7099 - DNA, 23 bp, Homo sapiens
  source 1..23: mol_type = genomic DNA
tataaccagttagcctacgacgg

SEQ ID NO: 7100 - DNA, 23 bp, Homo sapiens
  source 1..23: mol_type = genomic DNA
tataaccagttcgcctacgacgg

SEQ ID NO: 7101 - DNA, 23 bp, Homo sapiens
  source 1..23: mol_type = genomic DNA
tatccaatacccaatgggagtgg

SEQ ID NO: 7102 - DNA, 23 bp, Homo sapiens
  source 1..23: mol_type = genomic DNA
tatcccaggtccctgtgtccagg

SEQ ID NO: 7103 - DNA, 23 bp, Homo sapiens
  source 1..23: mol_type = genomic DNA
tatcccaggtgcctgcgtccagg

SEQ ID NO: 7104 - DNA, 23 bp, Homo sapiens
  source 1..23: mol_type = genomic DNA
tatcccaggtgcctgtgtccagg

SEQ ID NO: 7105 - DNA, 23 bp, Homo sapiens
  source 1..23: mol_type = genomic DNA
tatccgacacccaatgggagtgg

SEQ ID NO: 7106 - DNA, 23 bp, Homo sapiens
  source 1..23: mol_type = genomic DNA
tatctctgctcctctccagaagg

SEQ ID NO: 7107 - DNA, 23 bp, Homo sapiens
  source 1..23: mol_type = genomic DNA
tatctctgctcctgtccagaagg

SEQ ID NO: 7108 - DNA, 23 bp, Homo sapiens
  source 1..23: mol_type = genomic DNA
tatctctgctcttctccagaagg

SEQ ID NO: 7109 - DNA, 23 bp, Homo sapiens
  source 1..23: mol_type = genomic DNA
tatctctgctcttgtccagaagg

SEQ ID NO: 7110 - DNA, 23 bp, Homo sapiens
  source 1..23: mol_type = genomic DNA
tatctctgttcttgtccagaagg

SEQ ID NO: 7111 - DNA, 23 bp, Homo sapiens
  source 1..23: mol_type = genomic DNA
tatctcttctcagggaaagcagg

SEQ ID NO: 7112 - DNA, 23 bp, Homo sapiens
  source 1..23: mol_type = genomic DNA
tatctcttctcctttccagaagg

SEQ ID NO: 7113 - DNA, 23 bp, Homo sapiens
  source 1..23: mol_type = genomic DNA
tatctgttctcagggaaagcagg

SEQ ID NO: 7114 - DNA, 23 bp, Homo sapiens
  source 1..23: mol_type = genomic DNA
tatgaacagcacgcctacgacgg

SEQ ID NO: 7115 - DNA, 23 bp, Homo sapiens
  source 1..23: mol_type = genomic DNA
tatgaccaggacgcctacgacgg

SEQ ID NO: 7116 - DNA, 23 bp, Homo sapiens
  source 1..23: mol_type = genomic DNA
tatgaccagtacgcctacgacgg

SEQ ID NO: 7117 - DNA, 23 bp, Homo sapiens
  source 1..23: mol_type = genomic DNA
tatgaccagtccgcctacgacgg

SEQ ID NO: 7118 - DNA, 23 bp, Homo sapiens
  source 1..23: mol_type = genomic DNA
tatgaccagttcgcctacgacgg

SEQ ID NO: 7119 - DNA, 23 bp, Homo sapiens
  source 1..23: mol_type = genomic DNA
tatgactacagacccaaggcagg

SEQ ID NO: 7120 - DNA, 23 bp, Homo sapiens
  source 1..23: mol_type = genomic DNA
tatgactacagacccagggcagg

SEQ ID NO: 7121 - DNA, 23 bp, Homo sapiens
  source 1..23: mol_type = genomic DNA
tatgactgcagacccagggcagg

SEQ ID NO: 7122 - DNA, 23 bp, Homo sapiens
  source 1..23: mol_type = genomic DNA
tattgtggttgggagcccatggg

SEQ ID NO: 7123 - DNA, 23 bp, Homo sapiens
  source 1..23: mol_type = genomic DNA
tattgtgtttgggagcccatggg

SEQ ID NO: 7124 - DNA, 23 bp, Homo sapiens
  source 1..23: mol_type = genomic DNA
tattgtgtttgggagcccgtggg

SEQ ID NO: 7125 - DNA, 23 bp, Homo sapiens
  source 1..23: mol_type = genomic DNA
tcaaagaatccccattacccagg

SEQ ID NO: 7126 - DNA, 23 bp, Homo sapiens
  source 1..23: mol_type = genomic DNA
tcaaagaatctccattacccagg

SEQ ID NO: 7127 - DNA, 23 bp, Homo sapiens
  source 1..23: mol_type = genomic DNA
tcaaagaatgtccattacccagg

SEQ ID NO: 7128 - DNA, 23 bp, Homo sapiens
  source 1..23: mol_type = genomic DNA
tcaaaggatccccattacccagg

SEQ ID NO: 7129 - DNA, 23 bp, Homo sapiens
  source 1..23: mol_type = genomic DNA
tcaaaggatccccattacctagg

SEQ ID NO: 7130 - DNA, 23 bp, Homo sapiens
  source 1..23: mol_type = genomic DNA
tcaagggtctcggggtcccgcgg

SEQ ID NO: 7131 - DNA, 23 bp, Homo sapiens
  source 1..23: mol_type = genomic DNA
tcacagctccaaagagaaccagg

SEQ ID NO: 7132 - DNA, 23 bp, Homo sapiens
  source 1..23: mol_type = genomic DNA
tcacagctccaaggagaaccagg

SEQ ID NO: 7133 - DNA, 23 bp, Homo sapiens
  source 1..23: mol_type = genomic DNA
tcacagctcctaggacagctagg

SEQ ID NO: 7134 - DNA, 23 bp, Homo sapiens
  source 1..23: mol_type = genomic DNA
tcacaggggctaacgcagcctgg

SEQ ID NO: 7135 - DNA, 23 bp, Homo sapiens
  source 1..23: mol_type = genomic DNA
tcaccctccctctgctcctgagg

SEQ ID NO: 7136 - DNA, 23 bp, Homo sapiens
  source 1..23: mol_type = genomic DNA
tcaccctccctctggtcctgagg

SEQ ID NO: 7137 - DNA, 23 bp, Homo sapiens
  source 1..23: mol_type = genomic DNA
tcaccgctatgatgtgtaggagg

SEQ ID NO: 7138 - DNA, 23 bp, Homo sapiens
  source 1..23: mol_type = genomic DNA
tcaccttcccctcctttcccagg

SEQ ID NO: 7139 - DNA, 23 bp, Homo sapiens
  source 1..23: mol_type = genomic DNA
tcacgacccctcatcccccacgg

SEQ ID NO: 7140 - DNA, 23 bp, Homo sapiens
  source 1..23: mol_type = genomic DNA
tcacgacccctcatcccctacgg

SEQ ID NO: 7141 - DNA, 23 bp, Homo sapiens
  source 1..23: mol_type = genomic DNA
tcacgacctctcatcccccacgg

SEQ ID NO: 7142 - DNA, 23 bp, Homo sapiens
  source 1..23: mol_type = genomic DNA
tcacgactccccatcccccacgg

SEQ ID NO: 7143 - DNA, 23 bp, Homo sapiens
  source 1..23: mol_type = genomic DNA
tcactcggtcagcctgtgcctgg

SEQ ID NO: 7144 - DNA, 23 bp, Homo sapiens
  source 1..23: mol_type = genomic DNA
tcactcggtcagtctgtgcctgg

SEQ ID NO: 7145 - DNA, 23 bp, Homo sapiens
  source 1..23: mol_type = genomic DNA
tcactctctggtacagaatctgg

SEQ ID NO: 7146 - DNA, 23 bp, Homo sapiens
  source 1..23: mol_type = genomic DNA
tcactctctggtacaggatctgg

SEQ ID NO: 7147 - DNA, 23 bp, Homo sapiens
  source 1..23: mol_type = genomic DNA
tcacttctcccaacctgcgtcgg

SEQ ID NO: 7148 - DNA, 23 bp, Homo sapiens
  source 1..23: mol_type = genomic DNA
tcagaccaccaagcacaagtggg

SEQ ID NO: 7149 - DNA, 23 bp, Homo sapiens
  source 1..23: mol_type = genomic DNA
tcagagcccacaggagacgtggg

SEQ ID NO: 7150 - DNA, 23 bp, Homo sapiens
  source 1..23: mol_type = genomic DNA
tcagagcccacaggagatgtggg

SEQ ID NO: 7151 - DNA, 23 bp, Homo sapiens
  source 1..23: mol_type = genomic DNA
tcagagcccgcaggagacgtggg

SEQ ID NO: 7152 - DNA, 23 bp, Homo sapiens
  source 1..23: mol_type = genomic DNA
tcagagcccgcaggagatgtggg

SEQ ID NO: 7153 - DNA, 23 bp, Homo sapiens
  source 1..23: mol_type = genomic DNA
tcagagccctcaggagacgtggg

SEQ ID NO: 7154 - DNA, 23 bp, Homo sapiens
  source 1..23: mol_type = genomic DNA
tcagagtcactctctggtacagg

SEQ ID NO: 7155 - DNA, 23 bp, Homo sapiens
  source 1..23: mol_type = genomic DNA
tcagatcaccaagcgcaagtggg

SEQ ID NO: 7156 - DNA, 23 bp, Homo sapiens
  source 1..23: mol_type = genomic DNA
tcagatcacccagcgcaagtggg

SEQ ID NO: 7157 - DNA, 23 bp, Homo sapiens
  source 1..23: mol_type = genomic DNA
tcagatcacccagcgcaagttgg

SEQ ID NO: 7158 - DNA, 23 bp, Homo sapiens
  source 1..23: mol_type = genomic DNA
tcagatcacccagctcaagtggg

SEQ ID NO: 7159 - DNA, 23 bp, Homo sapiens
  source 1..23: mol_type = genomic DNA
tcagatctcccagcgcaagtggg

SEQ ID NO: 7160 - DNA, 23 bp, Homo sapiens
  source 1..23: mol_type = genomic DNA
tcagatctcccagcgcaagttgg

SEQ ID NO: 7161 - DNA, 23 bp, Homo sapiens
  source 1..23: mol_type = genomic DNA
tcagccctgacccagctgaaggg

SEQ ID NO: 7162 - DNA, 23 bp, Homo sapiens
  source 1..23: mol_type = genomic DNA
tcagccctgacccggctgaaggg

SEQ ID NO: 7163 - DNA, 23 bp, Homo sapiens
  source 1..23: mol_type = genomic DNA
tcagccctgacctggctgaaggg

SEQ ID NO: 7164 - DNA, 23 bp, Homo sapiens
  source 1..23: mol_type = genomic DNA
tcagcgtgggaagagggtcatgg

SEQ ID NO: 7165 - DNA, 23 bp, Homo sapiens
  source 1..23: mol_type = genomic DNA
tcaggaaacatgaagaaagcagg

SEQ ID NO: 7166 - DNA, 23 bp, Homo sapiens
  source 1..23: mol_type = genomic DNA
tcaggacccctcatcccccacgg

SEQ ID NO: 7167 - DNA, 23 bp, Homo sapiens
  source 1..23: mol_type = genomic DNA
tcaggagggcgattggtccaggg

SEQ ID NO: 7168 - DNA, 23 bp, Homo sapiens
  source 1..23: mol_type = genomic DNA
tcaggctgcgtgtaagtgatggg

SEQ ID NO: 7169 - DNA, 23 bp, Homo sapiens
  source 1..23: mol_type = genomic DNA
tcaggctgcgtgtaagtggtggg

SEQ ID NO: 7170 - DNA, 23 bp, Homo sapiens
  source 1..23: mol_type = genomic DNA
tcagggactagaattttccacgg

SEQ ID NO: 7171 - DNA, 23 bp, Homo sapiens
  source 1..23: mol_type = genomic DNA
tcagggccatgcgatcttagggg

SEQ ID NO: 7172 - DNA, 23 bp, Homo sapiens
  source 1..23: mol_type = genomic DNA
tcagggccttaaggtcctagagg

SEQ ID NO: 7173 - DNA, 23 bp, Homo sapiens
  source 1..23: mol_type = genomic DNA
tcagggcggggcggggctcgggg

SEQ ID NO: 7174 - DNA, 23 bp, Homo sapiens
  source 1..23: mol_type = genomic DNA
tcaggggaaggtccctgctaagg

SEQ ID NO: 7175 - DNA, 23 bp, Homo sapiens
  source 1..23: mol_type = genomic DNA
tcaggtagggaaggggtgagggg

SEQ ID NO: 7176 - DNA, 23 bp, Homo sapiens
  source 1..23: mol_type = genomic DNA
tcaggtggagaaggggtgaaagg

SEQ ID NO: 7177 - DNA, 23 bp, Homo sapiens
  source 1..23: mol_type = genomic DNA
tcaggtggagaaggggtgaaggg

SEQ ID NO: 7178 - DNA, 23 bp, Homo sapiens
  source 1..23: mol_type = genomic DNA
tcaggtggggaagggatgaaggg

SEQ ID NO: 7179 - DNA, 23 bp, Homo sapiens
  source 1..23: mol_type = genomic DNA
tcaggtggggaaggggtgaaggg

SEQ ID NO: 7180 - DNA, 23 bp, Homo sapiens
  source 1..23: mol_type = genomic DNA
tcatcccattctccattcaaggg

SEQ ID NO: 7181 - DNA, 23 bp, Homo sapiens
  source 1..23: mol_type = genomic DNA
tcatcccccacggacggcccggg

SEQ ID NO: 7182 - DNA, 23 bp, Homo sapiens
  source 1..23: mol_type = genomic DNA
tcatcccccacggacgggccagg

SEQ ID NO: 7183 - DNA, 23 bp, Homo sapiens
  source 1..23: mol_type = genomic DNA
tcatcccccacggacgggccggg

SEQ ID NO: 7184 - DNA, 23 bp, Homo sapiens
  source 1..23: mol_type = genomic DNA
tcatcccctacggacgggccagg

SEQ ID NO: 7185 - DNA, 23 bp, Homo sapiens
  source 1..23: mol_type = genomic DNA
tcatctttcctgttccagagagg

SEQ ID NO: 7186 - DNA, 23 bp, Homo sapiens
  source 1..23: mol_type = genomic DNA
tcatctttcctgttgcagagagg

SEQ ID NO: 7187 - DNA, 23 bp, Homo sapiens
  source 1..23: mol_type = genomic DNA
tcatgccattctccattcaacgg

SEQ ID NO: 7188 - DNA, 23 bp, Homo sapiens
  source 1..23: mol_type = genomic DNA
tcatgccattctccattcaaggg

SEQ ID NO: 7189 - DNA, 23 bp, Homo sapiens
  source 1..23: mol_type = genomic DNA
tcatggtggacatcggggtgggg

SEQ ID NO: 7190 - DNA, 23 bp, Homo sapiens
  source 1..23: mol_type = genomic DNA
tcatggtggacatgggggtgggg

SEQ ID NO: 7191 - DNA, 23 bp, Homo sapiens
  source 1..23: mol_type = genomic DNA
tcatgtctcttagggaaagcagg

SEQ ID NO: 7192 - DNA, 23 bp, Homo sapiens
  source 1..23: mol_type = genomic DNA
tcatgtcttttacggaaagcagg

SEQ ID NO: 7193 - DNA, 23 bp, Homo sapiens
  source 1..23: mol_type = genomic DNA
tcatgtcttttagggaaagcagg

SEQ ID NO: 7194 - DNA, 23 bp, Homo sapiens
  source 1..23: mol_type = genomic DNA
tccaacttttctgagtccttcgg

SEQ ID NO: 7195 - DNA, 23 bp, Homo sapiens
  source 1..23: mol_type = genomic DNA
tccaagcctcagccctgacccgg

SEQ ID NO: 7196 - DNA, 23 bp, Homo sapiens
  source 1..23: mol_type = genomic DNA
tccaagggccgtgtctgcactgg

SEQ ID NO: 7197 - DNA, 23 bp, Homo sapiens
  source 1..23: mol_type = genomic DNA
tccaagggccgtgtctgcattgg

SEQ ID NO: 7198 - DNA, 23 bp, Homo sapiens
  source 1..23: mol_type = genomic DNA
tccaatgaatagattatcccagg

SEQ ID NO: 7199 - DNA, 23 bp, Homo sapiens
  source 1..23: mol_type = genomic DNA
tccacatccgtgtcccggcccgg

SEQ ID NO: 7200 - DNA, 23 bp, Homo sapiens
  source 1..23: mol_type = genomic DNA
tccacatccgtgtcctggcccgg

SEQ ID NO: 7201 - DNA, 23 bp, Homo sapiens
  source 1..23: mol_type = genomic DNA
tccaccccaaggtggatctgcgg

SEQ ID NO: 7202 - DNA, 23 bp, Homo sapiens
  source 1..23: mol_type = genomic DNA
tccactgccgggccgggacacgg

SEQ ID NO: 7203 - DNA, 23 bp, Homo sapiens
  source 1..23: mol_type = genomic DNA
tccagccagcgacagtgcccagg

SEQ ID NO: 7204 - DNA, 23 bp, Homo sapiens
  source 1..23: mol_type = genomic DNA
tccagcttttctgagtccttcgg

SEQ ID NO: 7205 - DNA, 23 bp, Homo sapiens
  source 1..23: mol_type = genomic DNA
tccaggcagcgacagtgcccagg

SEQ ID NO: 7206 - DNA, 23 bp, Homo sapiens
  source 1..23: mol_type = genomic DNA
tccaggtctcgatcagggccagg

SEQ ID NO: 7207 - DNA, 23 bp, Homo sapiens
  source 1..23: mol_type = genomic DNA
tccatgtcccggcccggccgcgg

SEQ ID NO: 7208 - DNA, 23 bp, Homo sapiens
  source 1..23: mol_type = genomic DNA
tcccactcccattgggtgtcggg

SEQ ID NO: 7209 - DNA, 23 bp, Homo sapiens
  source 1..23: mol_type = genomic DNA
tcccagcagtcacaagtcacagg

SEQ ID NO: 7210 - DNA, 23 bp, Homo sapiens
  source 1..23: mol_type = genomic DNA
tcccagggccgtgtctgcattgg

SEQ ID NO: 7211 - DNA, 23 bp, Homo sapiens
  source 1..23: mol_type = genomic DNA
tcccaggtgcctgcatccgctgg

SEQ ID NO: 7212 - DNA, 23 bp, Homo sapiens
  source 1..23: mol_type = genomic DNA
tcccatcaccgccataatcaagg

SEQ ID NO: 7213 - DNA, 23 bp, Homo sapiens
  source 1..23: mol_type = genomic DNA
tcccatcaccgccgtaatcaagg

SEQ ID NO: 7214 - DNA, 23 bp, Homo sapiens
  source 1..23: mol_type = genomic DNA
tcccatcaccgctgtaatcaagg

SEQ ID NO: 7215 - DNA, 23 bp, Homo sapiens
  source 1..23: mol_type = genomic DNA
tcccatcactgccgtaatcaagg

SEQ ID NO: 7216 - DNA, 23 bp, Homo sapiens
  source 1..23: mol_type = genomic DNA
tcccattctccattcaagggagg

SEQ ID NO: 7217 - DNA, 23 bp, Homo sapiens
  source 1..23: mol_type = genomic DNA
tcccattcttcaggtatctgcgg

SEQ ID NO: 7218 - DNA, 23 bp, Homo sapiens
  source 1..23: mol_type = genomic DNA
tccccaattcccactcccattgg

SEQ ID NO: 7219 - DNA, 23 bp, Homo sapiens
  source 1..23: mol_type = genomic DNA
tccccacttcccactcccattgg

SEQ ID NO: 7220 - DNA, 23 bp, Homo sapiens
  source 1..23: mol_type = genomic DNA
tccccatttcccactcccattgg

SEQ ID NO: 7221 - DNA, 23 bp, Homo sapiens
  source 1..23: mol_type = genomic DNA
tcccccacggacgggccaggtgg

SEQ ID NO: 7222 - DNA, 23 bp, Homo sapiens
  source 1..23: mol_type = genomic DNA
tccccccaggttggtcggggcgg

SEQ ID NO: 7223 - DNA, 23 bp, Homo sapiens
  source 1..23: mol_type = genomic DNA
tccccccgggtgggtcggggcgg

SEQ ID NO: 7224 - DNA, 23 bp, Homo sapiens
  source 1..23: mol_type = genomic DNA
tccccccgggttggtcggggcgg

SEQ ID NO: 7225 - DNA, 23 bp, Homo sapiens
  source 1..23: mol_type = genomic DNA
tcccccgggttggtcggggctgg

SEQ ID NO: 7226 - DNA, 23 bp, Homo sapiens
  source 1..23: mol_type = genomic DNA
tccccgcgggttgggcggggcgg

SEQ ID NO: 7227 - DNA, 23 bp, Homo sapiens
  source 1..23: mol_type = genomic DNA
tccccgcgggttggtcagggcgg

SEQ ID NO: 7228 - DNA, 23 bp, Homo sapiens
  source 1..23: mol_type = genomic DNA
tccccgcgggttggtcggggcgg

SEQ ID NO: 7229 - DNA, 23 bp, Homo sapiens
  source 1..23: mol_type = genomic DNA
tcccctccttaccccagctcagg

SEQ ID NO: 7230 - DNA, 23 bp, Homo sapiens
  source 1..23: mol_type = genomic DNA
tcccgagagcagcaggaggacgg

SEQ ID NO: 7231 - DNA, 23 bp, Homo sapiens
  source 1..23: mol_type = genomic DNA
tcccgagagcagcaggaggaggg

SEQ ID NO: 7232 - DNA, 23 bp, Homo sapiens
  source 1..23: mol_type = genomic DNA
tcccgagagcagcaggatgaggg

SEQ ID NO: 7233 - DNA, 23 bp, Homo sapiens
  source 1..23: mol_type = genomic DNA
tcccggcatggcctcccacgagg

SEQ ID NO: 7234 - DNA, 23 bp, Homo sapiens
  source 1..23: mol_type = genomic DNA
tcccgggatggcctcccacgagg

SEQ ID NO: 7235 - DNA, 23 bp, Homo sapiens
  source 1..23: mol_type = genomic DNA
tcccgggatggccttccacgagg

SEQ ID NO: 7236 - DNA, 23 bp, Homo sapiens
  source 1..23: mol_type = genomic DNA
tcccgggctggcctcccacaagg

SEQ ID NO: 7237 - DNA, 23 bp, Homo sapiens
  source 1..23: mol_type = genomic DNA
tcccgttctccaggtatccgcgg

SEQ ID NO: 7238 - DNA, 23 bp, Homo sapiens
  source 1..23: mol_type = genomic DNA
tcccgttctccaggtatctgcgg

SEQ ID NO: 7239 - DNA, 23 bp, Homo sapiens
  source 1..23: mol_type = genomic DNA
tcccgttctccaggtgtctgcgg

SEQ ID NO: 7240 - DNA, 23 bp, Homo sapiens
  source 1..23: mol_type = genomic DNA
tcccgttcttcaggtatctgcgg

SEQ ID NO: 7241 - DNA, 23 bp, Homo sapiens
  source 1..23: mol_type = genomic DNA
tccctccttaccccatctcaggg

SEQ ID NO: 7242 - DNA, 23 bp, Homo sapiens
  source 1..23: mol_type = genomic DNA
tccctctcccaacctacgtaggg

SEQ ID NO: 7243 - DNA, 23 bp, Homo sapiens
  source 1..23: mol_type = genomic DNA
tccctctcccaacctatgtaggg

SEQ ID NO: 7244 - DNA, 23 bp, Homo sapiens
  source 1..23: mol_type = genomic DNA
tccctctgccaacctatgtaggg

SEQ ID NO: 7245 - DNA, 23 bp, Homo sapiens
  source 1..23: mol_type = genomic DNA
tccctctgctcctgagggagagg

SEQ ID NO: 7246 - DNA, 23 bp, Homo sapiens
  source 1..23: mol_type = genomic DNA
tccctctggtcctgagggagagg

SEQ ID NO: 7247 - DNA, 23 bp, Homo sapiens
  source 1..23: mol_type = genomic DNA
tccgagagccttgtctgcattgg

SEQ ID NO: 7248 - DNA, 23 bp, Homo sapiens
  source 1..23: mol_type = genomic DNA
tccgagggccgcgtctgcaatgg

SEQ ID NO: 7249 - DNA, 23 bp, Homo sapiens
  source 1..23: mol_type = genomic DNA
tccgagggccgcgtctgcattgg

SEQ ID NO: 7250 - DNA, 23 bp, Homo sapiens
  source 1..23: mol_type = genomic DNA
tccgagtccgggtgggtgactgg

SEQ ID NO: 7251 - DNA, 23 bp, Homo sapiens
  source 1..23: mol_type = genomic DNA
tccgcagacacctggagaacggg

SEQ ID NO: 7252 - DNA, 23 bp, Homo sapiens
  source 1..23: mol_type = genomic DNA
tccgcagatacctgaagaacggg

SEQ ID NO: 7253 - DNA, 23 bp, Homo sapiens
  source 1..23: mol_type = genomic DNA
tccgcagatacctgaagaatggg

SEQ ID NO: 7254 - DNA, 23 bp, Homo sapiens
  source 1..23: mol_type = genomic DNA
tccgcagatacctggagaacagg

SEQ ID NO: 7255 - DNA, 23 bp, Homo sapiens
  source 1..23: mol_type = genomic DNA
tccgcagatacctggagaacggg

SEQ ID NO: 7256 - DNA, 23 bp, Homo sapiens
  source 1..23: mol_type = genomic DNA
tccgcagatccaccttggggtgg

SEQ ID NO: 7257 - DNA, 23 bp, Homo sapiens
  source 1..23: mol_type = genomic DNA
tccgcggatacctggagaacggg

SEQ ID NO: 7258 - DNA, 23 bp, Homo sapiens
  source 1..23: mol_type = genomic DNA
tccgcggccaggccgggacacgg

SEQ ID NO: 7259 - DNA, 23 bp, Homo sapiens
  source 1..23: mol_type = genomic DNA
tccgcggccgggccgggacacgg

SEQ ID NO: 7260 - DNA, 23 bp, Homo sapiens
  source 1..23: mol_type = genomic DNA
tccggccccgaccaacccggggg

SEQ ID NO: 7261 - DNA, 23 bp, Homo sapiens
  source 1..23: mol_type = genomic DNA
tccggttgtagtagccgcgcagg

SEQ ID NO: 7262 - DNA, 23 bp, Homo sapiens
  source 1..23: mol_type = genomic DNA
tccgtgtcccggcccggcagtgg

SEQ ID NO: 7263 - DNA, 23 bp, Homo sapiens
  source 1..23: mol_type = genomic DNA
tccgtgtcccggcccggccgcgg

SEQ ID NO: 7264 - DNA, 23 bp, Homo sapiens
  source 1..23: mol_type = genomic DNA
tccgtgtcccggcctggccgcgg

SEQ ID NO: 7265 - DNA, 23 bp, Homo sapiens
  source 1..23: mol_type = genomic DNA
tccgtgtcctggcccggccgcgg

SEQ ID NO: 7266 - DNA, 23 bp, Homo sapiens
  source 1..23: mol_type = genomic DNA
tcctaaggtctgtccttagcagg

SEQ ID NO: 7267 - DNA, 23 bp, Homo sapiens
  source 1..23: mol_type = genomic DNA
tcctccaggcgcggcttcccggg

SEQ ID NO: 7268 - DNA, 23 bp, Homo sapiens
  source 1..23: mol_type = genomic DNA
tcctcccggcgcggctacccggg

SEQ ID NO: 7269 - DNA, 23 bp, Homo sapiens
  source 1..23: mol_type = genomic DNA
tcctcccggcgcggctcccccgg

SEQ ID NO: 7270 - DNA, 23 bp, Homo sapiens
  source 1..23: mol_type = genomic DNA
tcctcccggcgcggctccccggg

SEQ ID NO: 7271 - DNA, 23 bp, Homo sapiens
  source 1..23: mol_type = genomic DNA
tcctcccggcgcggctcctcagg

SEQ ID NO: 7272 - DNA, 23 bp, Homo sapiens
  source 1..23: mol_type = genomic DNA
tcctcccggcgcggcttcccggg

SEQ ID NO: 7273 - DNA, 23 bp, Homo sapiens
  source 1..23: mol_type = genomic DNA
tcctccctgcgcggctccccggg

SEQ ID NO: 7274 - DNA, 23 bp, Homo sapiens
  source 1..23: mol_type = genomic DNA
tcctcgtggaaggccatcccggg

SEQ ID NO: 7275 - DNA, 23 bp, Homo sapiens
  source 1..23: mol_type = genomic DNA
tcctcgtgggaggccatcccggg

SEQ ID NO: 7276 - DNA, 23 bp, Homo sapiens
  source 1..23: mol_type = genomic DNA
tcctcgtgggaggccatgccggg

SEQ ID NO: 7277 - DNA, 23 bp, Homo sapiens
  source 1..23: mol_type = genomic DNA
tcctctagccacatcttctgtgg

SEQ ID NO: 7278 - DNA, 23 bp, Homo sapiens
  source 1..23: mol_type = genomic DNA
tcctctagccacatgttctgtgg

SEQ ID NO: 7279 - DNA, 23 bp, Homo sapiens
  source 1..23: mol_type = genomic DNA
tcctctccctcaggaccagaggg

SEQ ID NO: 7280 - DNA, 23 bp, Homo sapiens
  source 1..23: mol_type = genomic DNA
tcctctccctcaggagcagaggg

SEQ ID NO: 7281 - DNA, 23 bp, Homo sapiens
  source 1..23: mol_type = genomic DNA
tcctgacctgcgcccccggccgg

SEQ ID NO: 7282 - DNA, 23 bp, Homo sapiens
  source 1..23: mol_type = genomic DNA
tcctggccctgaccgagacctgg

SEQ ID NO: 7283 - DNA, 23 bp, Homo sapiens
  source 1..23: mol_type = genomic DNA
tcctggcgggggcgcaggaccgg

SEQ ID NO: 7284 - DNA, 23 bp, Homo sapiens
  source 1..23: mol_type = genomic DNA
tcctgtcccacgtctcctgaggg

SEQ ID NO: 7285 - DNA, 23 bp, Homo sapiens
  source 1..23: mol_type = genomic DNA
tcctgtcccacgtctcctgcggg

SEQ ID NO: 7286 - DNA, 23 bp, Homo sapiens
  source 1..23: mol_type = genomic DNA
tcctgtcccacgtctcctgtggg

SEQ ID NO: 7287 - DNA, 23 bp, Homo sapiens
  source 1..23: mol_type = genomic DNA
tcctgttctccaggtatctgcgg

SEQ ID NO: 7288 - DNA, 23 bp, Homo sapiens
  source 1..23: mol_type = genomic DNA
tcctgttttggttctactccagg

SEQ ID NO: 7289 - DNA, 23 bp, Homo sapiens
  source 1..23: mol_type = genomic DNA
tcctgtttttgttctactccagg

SEQ ID NO: 7290 - DNA, 23 bp, Homo sapiens
  source 1..23: mol_type = genomic DNA
tccttctggagcccttcagccgg

SEQ ID NO: 7291 - DNA, 23 bp, Homo sapiens
  source 1..23: mol_type = genomic DNA
tccttgtgggaggccagcccggg

SEQ ID NO: 7292 - DNA, 23 bp, Homo sapiens
  source 1..23: mol_type = genomic DNA
tcgacagcgacgccgcgagccgg

SEQ ID NO: 7293 - DNA, 23 bp, Homo sapiens
  source 1..23: mol_type = genomic DNA
tcgccctccctctggtcctgagg

SEQ ID NO: 7294 - DNA, 23 bp, Homo sapiens
  source 1..23: mol_type = genomic DNA
tcgccggtcgagggtctgggcgg

SEQ ID NO: 7295 - DNA, 23 bp, Homo sapiens
  source 1..23: mol_type = genomic DNA
tcgccggtcgagggtttgggcgg

SEQ ID NO: 7296 - DNA, 23 bp, Homo sapiens
  source 1..23: mol_type = genomic DNA
tcgcgggacggggctgaccacgg

SEQ ID NO: 7297 - DNA, 23 bp, Homo sapiens
  source 1..23: mol_type = genomic DNA
tcgctactgtgatgtgtaggagg

SEQ ID NO: 7298 - DNA, 23 bp, Homo sapiens
  source 1..23: mol_type = genomic DNA
tcgctcggtcagtctgtgactgg

SEQ ID NO: 7299 - DNA, 23 bp, Homo sapiens
  source 1..23: mol_type = genomic DNA
tcgctcggtcagtctgtgagtgg

SEQ ID NO: 7300 - DNA, 23 bp, Homo sapiens
  source 1..23: mol_type = genomic DNA
tcgctcggttagtctgtgagtgg

SEQ ID NO: 7301 - DNA, 23 bp, Homo sapiens
  source 1..23: mol_type = genomic DNA
tcgctgccgtgatgtggaggagg

SEQ ID NO: 7302 - DNA, 23 bp, Homo sapiens
  source 1..23: mol_type = genomic DNA
tcgctgctgtgaggtggaggagg

SEQ ID NO: 7303 - DNA, 23 bp, Homo sapiens
  source 1..23: mol_type = genomic DNA
tcgctgctgtgatacataggagg

SEQ ID NO: 7304 - DNA, 23 bp, Homo sapiens
  source 1..23: mol_type = genomic DNA
tcgctgctgtgatgtggaggagg

SEQ ID NO: 7305 - DNA, 23 bp, Homo sapiens
  source 1..23: mol_type = genomic DNA
tcgctgctgtgatgtgtaggagg

SEQ ID NO: 7306 - DNA, 23 bp, Homo sapiens
  source 1..23: mol_type = genomic DNA
tcgctgctgtggtgtgtaggagg

SEQ ID NO: 7307 - DNA, 23 bp, Homo sapiens
  source 1..23: mol_type = genomic DNA
tcggacgggcgcttcctccgcgg

SEQ ID NO: 7308 - DNA, 23 bp, Homo sapiens
  source 1..23: mol_type = genomic DNA
tcggactggcgcttcctccgcgg

SEQ ID NO: 7309 - DNA, 23 bp, Homo sapiens
  source 1..23: mol_type = genomic DNA
tcggactggcgcttcctgcgcgg

SEQ ID NO: 7310 - DNA, 23 bp, Homo sapiens
  source 1..23: mol_type = genomic DNA
tcgggacctgcgccccgggccgg

SEQ ID NO: 7311 - DNA, 23 bp, Homo sapiens
  source 1..23: mol_type = genomic DNA
tcgggactggggcggggctcggg

SEQ ID NO: 7312 - DNA, 23 bp, Homo sapiens
  source 1..23: mol_type = genomic DNA
tcggggccggacggggctcgggg

SEQ ID NO: 7313 - DNA, 23 bp, Homo sapiens
  source 1..23: mol_type = genomic DNA
tcggggccgggcagggcttgggg

SEQ ID NO: 7314 - DNA, 23 bp, Homo sapiens
  source 1..23: mol_type = genomic DNA
tcggggccgggcggggctcgggg

SEQ ID NO: 7315 - DNA, 23 bp, Homo sapiens
  source 1..23: mol_type = genomic DNA
tcggggcggggcggggctcgggg

SEQ ID NO: 7316 - DNA, 23 bp, Homo sapiens
  source 1..23: mol_type = genomic DNA
tcggggctgggcggggctcgggg

SEQ ID NO: 7317 - DNA, 23 bp, Homo sapiens
  source 1..23: mol_type = genomic DNA
tcggggctggggcggggctcggg

SEQ ID NO: 7318 - DNA, 23 bp, Homo sapiens
  source 1..23: mol_type = genomic DNA
tcgggggaccgggctgaccacgg

SEQ ID NO: 7319 - DNA, 23 bp, Homo sapiens
  source 1..23: mol_type = genomic DNA
tcgggggaccgggctgaccgcgg

SEQ ID NO: 7320 - DNA, 23 bp, Homo sapiens
  source 1..23: mol_type = genomic DNA
tcgggggaccgggctgacctcgg

SEQ ID NO: 7321 - DNA, 23 bp, Homo sapiens
  source 1..23: mol_type = genomic DNA
tcgggggacgggctgaccacggg

SEQ ID NO: 7322 - DNA, 23 bp, Homo sapiens
  source 1..23: mol_type = genomic DNA
tcgggggacggggctgaccacgg

SEQ ID NO: 7323 - DNA, 23 bp, Homo sapiens
  source 1..23: mol_type = genomic DNA
tcgggggacggggctgaccgcgg

SEQ ID NO: 7324 - DNA, 23 bp, Homo sapiens
  source 1..23: mol_type = genomic DNA
tcgggggacggtgctgaccgcgg

SEQ ID NO: 7325 - DNA, 23 bp, Homo sapiens
  source 1..23: mol_type = genomic DNA
tcgggggactgggctgaccgcgg

SEQ ID NO: 7326 - DNA, 23 bp, Homo sapiens
  source 1..23: mol_type = genomic DNA
tcgggggactgggctgaccgtgg

SEQ ID NO: 7327 - DNA, 23 bp, Homo sapiens
  source 1..23: mol_type = genomic DNA
tcgggggcggatctcggacccgg

SEQ ID NO: 7328 - DNA, 23 bp, Homo sapiens
  source 1..23: mol_type = genomic DNA
tcgtcccggcgcggctcccccgg

SEQ ID NO: 7329 - DNA, 23 bp, Homo sapiens
  source 1..23: mol_type = genomic DNA
tcgtgacctgcgccccaggccgg

SEQ ID NO: 7330 - DNA, 23 bp, Homo sapiens
  source 1..23: mol_type = genomic DNA
tcgtgacctgcgcccccggccgg

SEQ ID NO: 7331 - DNA, 23 bp, Homo sapiens
  source 1..23: mol_type = genomic DNA
tcgtgacctgcgcccccgggcgg

SEQ ID NO: 7332 - DNA, 23 bp, Homo sapiens
  source 1..23: mol_type = genomic DNA
tcgtgacctgcgccccgggccgg

SEQ ID NO: 7333 - DNA, 23 bp, Homo sapiens
  source 1..23: mol_type = genomic DNA
tcgtgacctgcgccccgggctgg

SEQ ID NO: 7334 - DNA, 23 bp, Homo sapiens
  source 1..23: mol_type = genomic DNA
tcgtggagaccaggcctgcaggg

SEQ ID NO: 7335 - DNA, 23 bp, Homo sapiens
  source 1..23: mol_type = genomic DNA
tcgtggggaaaccgcctctgcgg

SEQ ID NO: 7336 - DNA, 23 bp, Homo sapiens
  source 1..23: mol_type = genomic DNA
tctagaacccgacacccaatggg

SEQ ID NO: 7337 - DNA, 23 bp, Homo sapiens
  source 1..23: mol_type = genomic DNA
tctagaatccgacacccaatggg

SEQ ID NO: 7338 - DNA, 23 bp, Homo sapiens
  source 1..23: mol_type = genomic DNA
tctagacacccgacacccaatgg

SEQ ID NO: 7339 - DNA, 23 bp, Homo sapiens
  source 1..23: mol_type = genomic DNA
tctagagtgggcgggggggcggg

SEQ ID NO: 7340 - DNA, 23 bp, Homo sapiens
  source 1..23: mol_type = genomic DNA
tctagagtgggcggggggggcgg

SEQ ID NO: 7341 - DNA, 23 bp, Homo sapiens
  source 1..23: mol_type = genomic DNA
tctagagtgggcggggggggtgg

SEQ ID NO: 7342 - DNA, 23 bp, Homo sapiens
  source 1..23: mol_type = genomic DNA
tctagagtgggtgggggtggcgg

SEQ ID NO: 7343 - DNA, 23 bp, Homo sapiens
  source 1..23: mol_type = genomic DNA
tctagagtgggtggggtggcagg

SEQ ID NO: 7344 - DNA, 23 bp, Homo sapiens
  source 1..23: mol_type = genomic DNA
tctagagtgggtggggtggcggg

SEQ ID NO: 7345 - DNA, 23 bp, Homo sapiens
  source 1..23: mol_type = genomic DNA
tctagatatccaatacccaatgg

SEQ ID NO: 7346 - DNA, 23 bp, Homo sapiens
  source 1..23: mol_type = genomic DNA
tctagatatccgacacccaatgg

SEQ ID NO: 7347 - DNA, 23 bp, Homo sapiens
  source 1..23: mol_type = genomic DNA
tctcaactgctccgccacacggg

SEQ ID NO: 7348 - DNA, 23 bp, Homo sapiens
  source 1..23: mol_type = genomic DNA
tctcaactgctccgccacatggg

SEQ ID NO: 7349 - DNA, 23 bp, Homo sapiens
  source 1..23: mol_type = genomic DNA
tctcaactgctccgcccaacggg

SEQ ID NO: 7350 - DNA, 23 bp, Homo sapiens
  source 1..23: mol_type = genomic DNA
tctcaactgctccgcccgacggg

SEQ ID NO: 7351 - DNA, 23 bp, Homo sapiens
  source 1..23: mol_type = genomic DNA
tctcaactgctccgcctcatggg

SEQ ID NO: 7352 - DNA, 23 bp, Homo sapiens
  source 1..23: mol_type = genomic DNA
tctcacctttacaagctgtgagg

SEQ ID NO: 7353 - DNA, 23 bp, Homo sapiens
  source 1..23: mol_type = genomic DNA
tctcactcccattgggtgtcggg

SEQ ID NO: 7354 - DNA, 23 bp, Homo sapiens
  source 1..23: mol_type = genomic DNA
tctcagcccctccttgccccagg

SEQ ID NO: 7355 - DNA, 23 bp, Homo sapiens
  source 1..23: mol_type = genomic DNA
tctcagcctccactcaggtcagg

SEQ ID NO: 7356 - DNA, 23 bp, Homo sapiens
  source 1..23: mol_type = genomic DNA
tctcagctgctccgccacacggg

SEQ ID NO: 7357 - DNA, 23 bp, Homo sapiens
  source 1..23: mol_type = genomic DNA
tctcagctgctccgcccgacggg

SEQ ID NO: 7358 - DNA, 23 bp, Homo sapiens
  source 1..23: mol_type = genomic DNA
tctcagctgctccgccgcacggg

SEQ ID NO: 7359 - DNA, 23 bp, Homo sapiens
  source 1..23: mol_type = genomic DNA
tctcagctgctccgccgtacggg

SEQ ID NO: 7360 - DNA, 23 bp, Homo sapiens
  source 1..23: mol_type = genomic DNA
tctcagctgctccgcctcacggg

SEQ ID NO: 7361 - DNA, 23 bp, Homo sapiens
  source 1..23: mol_type = genomic DNA
tctcaggctggtcacatgggtgg

SEQ ID NO: 7362 - DNA, 23 bp, Homo sapiens
  source 1..23: mol_type = genomic DNA
tctcagggtctcaggctccaagg

SEQ ID NO: 7363 - DNA, 23 bp, Homo sapiens
  source 1..23: mol_type = genomic DNA
tctcagggtctcaggctccgagg

SEQ ID NO: 7364 - DNA, 23 bp, Homo sapiens
  source 1..23: mol_type = genomic DNA
tctccacaagctccgtgtcctgg

SEQ ID NO: 7365 - DNA, 23 bp, Homo sapiens
  source 1..23: mol_type = genomic DNA
tctccacaagctcggtgtcctgg

SEQ ID NO: 7366 - DNA, 23 bp, Homo sapiens
  source 1..23: mol_type = genomic DNA
tctccacgagctccgtgtcctgg

SEQ ID NO: 7367 - DNA, 23 bp, Homo sapiens
  source 1..23: mol_type = genomic DNA
tctccactgctccgccacatggg

SEQ ID NO: 7368 - DNA, 23 bp, Homo sapiens
  source 1..23: mol_type = genomic DNA
tctccactgctccgccgcacggg

SEQ ID NO: 7369 - DNA, 23 bp, Homo sapiens
  source 1..23: mol_type = genomic DNA
tctccactgctccgcctcacggg

SEQ ID NO: 7370 - DNA, 23 bp, Homo sapiens
  source 1..23: mol_type = genomic DNA
tctccactgctccgcctcatggg

SEQ ID NO: 7371 - DNA, 23 bp, Homo sapiens
  source 1..23: mol_type = genomic DNA
tctccccagacgccgagatgcgg

SEQ ID NO: 7372 - DNA, 23 bp, Homo sapiens
  source 1..23: mol_type = genomic DNA
tctccccagaggccgagatgcgg

SEQ ID NO: 7373 - DNA, 23 bp, Homo sapiens
  source 1..23: mol_type = genomic DNA
tctccccagggtagaagcccagg

SEQ ID NO: 7374 - DNA, 23 bp, Homo sapiens
  source 1..23: mol_type = genomic DNA
tctcccggggcaagggtctcggg

SEQ ID NO: 7375 - DNA, 23 bp, Homo sapiens
  source 1..23: mol_type = genomic DNA
tctcccgggtcaagggtctcggg

SEQ ID NO: 7376 - DNA, 23 bp, Homo sapiens
  source 1..23: mol_type = genomic DNA
tctccctcaggaccagagggagg

SEQ ID NO: 7377 - DNA, 23 bp, Homo sapiens
  source 1..23: mol_type = genomic DNA
tctccctcaggagcagagggagg

SEQ ID NO: 7378 - DNA, 23 bp, Homo sapiens
  source 1..23: mol_type = genomic DNA
tctccgcagggtagaaacccagg

SEQ ID NO: 7379 - DNA, 23 bp, Homo sapiens
  source 1..23: mol_type = genomic DNA
tctccgcagggtagaagcccagg

SEQ ID NO: 7380 - DNA, 23 bp, Homo sapiens
  source 1..23: mol_type = genomic DNA
tctccgcagggtagaagctcagg

SEQ ID NO: 7381 - DNA, 23 bp, Homo sapiens
  source 1..23: mol_type = genomic DNA
tctccgctgctccgccacacggg

SEQ ID NO: 7382 - DNA, 23 bp, Homo sapiens
  source 1..23: mol_type = genomic DNA
tctccgctgctccgcctcacggg

SEQ ID NO: 7383 - DNA, 23 bp, Homo sapiens
  source 1..23: mol_type = genomic DNA
tctccggccgagggtctgggcgg

SEQ ID NO: 7384 - DNA, 23 bp, Homo sapiens
  source 1..23: mol_type = genomic DNA
tctccggtcgagggtctgggcgg

SEQ ID NO: 7385 - DNA, 23 bp, Homo sapiens
  source 1..23: mol_type = genomic DNA
tctccgtagggtagaagcccagg

SEQ ID NO: 7386 - DNA, 23 bp, Homo sapiens
  source 1..23: mol_type = genomic DNA
tctcctcagacaccgagatgcgg

SEQ ID NO: 7387 - DNA, 23 bp, Homo sapiens
  source 1..23: mol_type = genomic DNA
tctcctcagacgccgagatgcgg

SEQ ID NO: 7388 - DNA, 23 bp, Homo sapiens
  source 1..23: mol_type = genomic DNA
tctcggagtcccgcggcttcggg

SEQ ID NO: 7389 - DNA, 23 bp, Homo sapiens
  source 1..23: mol_type = genomic DNA
tctcggggtcccgcggcttcggg

SEQ ID NO: 7390 - DNA, 23 bp, Homo sapiens
  source 1..23: mol_type = genomic DNA
tctctccacctcctcacattagg

SEQ ID NO: 7391 - DNA, 23 bp, Homo sapiens
  source 1..23: mol_type = genomic DNA
tctctcggtcagtctgtgactgg

SEQ ID NO: 7392 - DNA, 23 bp, Homo sapiens
  source 1..23: mol_type = genomic DNA
tctctcggtcagtctgtgagtgg

SEQ ID NO: 7393 - DNA, 23 bp, Homo sapiens
  source 1..23: mol_type = genomic DNA
tctctcggtcagtctgtgcctgg

SEQ ID NO: 7394 - DNA, 23 bp, Homo sapiens
  source 1..23: mol_type = genomic DNA
tctctgcagggtagaagcccagg

SEQ ID NO: 7395 - DNA, 23 bp, Homo sapiens
  source 1..23: mol_type = genomic DNA
tctctgctgctccgccacatggg

SEQ ID NO: 7396 - DNA, 23 bp, Homo sapiens
  source 1..23: mol_type = genomic DNA
tctctgctgctccgccgcacggg

SEQ ID NO: 7397 - DNA, 23 bp, Homo sapiens
  source 1..23: mol_type = genomic DNA
tctctgctgctccgccgcatggg

SEQ ID NO: 7398 - DNA, 23 bp, Homo sapiens
  source 1..23: mol_type = genomic DNA
tctctgggtctcaagctcccagg

SEQ ID NO: 7399 - DNA, 23 bp, Homo sapiens
  source 1..23: mol_type = genomic DNA
tctgacctttagcagggtcaggg

SEQ ID NO: 7400 - DNA, 23 bp, Homo sapiens
  source 1..23: mol_type = genomic DNA
tctgaggagactctgagtccggg

SEQ ID NO: 7401 - DNA, 23 bp, Homo sapiens
  source 1..23: mol_type = genomic DNA
tctgaggagattctgagtccggg

SEQ ID NO: 7402 - DNA, 23 bp, Homo sapiens
  source 1..23: mol_type = genomic DNA
tctgaggagattttgagtccggg

SEQ ID NO: 7403 - DNA, 23 bp, Homo sapiens
  source 1..23: mol_type = genomic DNA
tctgagtccgggtgggtgactgg

SEQ ID NO: 7404 - DNA, 23 bp, Homo sapiens
  source 1..23: mol_type = genomic DNA
tctgagtccgggtgggtgcgtgg

SEQ ID NO: 7405 - DNA, 23 bp, Homo sapiens
  source 1..23: mol_type = genomic DNA
tctgagttttcttgtcccactgg

SEQ ID NO: 7406 - DNA, 23 bp, Homo sapiens
  source 1..23: mol_type = genomic DNA
tctgcaacaggaaagatgattgg

SEQ ID NO: 7407 - DNA, 23 bp, Homo sapiens
  source 1..23: mol_type = genomic DNA
tctgccgccttccccaccccagg

SEQ ID NO: 7408 - DNA, 23 bp, Homo sapiens
  source 1..23: mol_type = genomic DNA
tctgcgctcctggaccgccgcgg

SEQ ID NO: 7409 - DNA, 23 bp, Homo sapiens
  source 1..23: mol_type = genomic DNA
tctgctcccgatctgagtggagg

SEQ ID NO: 7410 - DNA, 23 bp, Homo sapiens
  source 1..23: mol_type = genomic DNA
tctgctcctgatctaagtggagg

SEQ ID NO: 7411 - DNA, 23 bp, Homo sapiens
  source 1..23: mol_type = genomic DNA
tctgctcctgatctgagtggagg

SEQ ID NO: 7412 - DNA, 23 bp, Homo sapiens
  source 1..23: mol_type = genomic DNA
tctgctctctaggacaattaagg

SEQ ID NO: 7413 - DNA, 23 bp, Homo sapiens
  source 1..23: mol_type = genomic DNA
tctggaaacccgacacccaatgg

SEQ ID NO: 7414 - DNA, 23 bp, Homo sapiens
  source 1..23: mol_type = genomic DNA
tctggaacaggaaagatgattgg

SEQ ID NO: 7415 - DNA, 23 bp, Homo sapiens
  source 1..23: mol_type = genomic DNA
tctggcatctctttctacaaagg

SEQ ID NO: 7416 - DNA, 23 bp, Homo sapiens
  source 1..23: mol_type = genomic DNA
tctggcatctctttctgcaaagg

SEQ ID NO: 7417 - DNA, 23 bp, Homo sapiens
  source 1..23: mol_type = genomic DNA
tctggccctgacccagacctggg

SEQ ID NO: 7418 - DNA, 23 bp, Homo sapiens
  source 1..23: mol_type = genomic DNA
tctgggagctgaagtggtcgggg

SEQ ID NO: 7419 - DNA, 23 bp, Homo sapiens
  source 1..23: mol_type = genomic DNA
tctggggagaatccgagtccggg

SEQ ID NO: 7420 - DNA, 23 bp, Homo sapiens
  source 1..23: mol_type = genomic DNA
tctggggagaatctgagtcccgg

SEQ ID NO: 7421 - DNA, 23 bp, Homo sapiens
  source 1..23: mol_type = genomic DNA
tctggggagaatctgagtccggg

SEQ ID NO: 7422 - DNA, 23 bp, Homo sapiens
  source 1..23: mol_type = genomic DNA
tctggggagaatgtgagtccggg

SEQ ID NO: 7423 - DNA, 23 bp, Homo sapiens
  source 1..23: mol_type = genomic DNA
tctggggagctgaagtggtcggg

SEQ ID NO: 7424 - DNA, 23 bp, Homo sapiens
  source 1..23: mol_type = genomic DNA
tctggggagctgaagtggtctgg

SEQ ID NO: 7425 - DNA, 23 bp, Homo sapiens
  source 1..23: mol_type = genomic DNA
tctggggcggggtggggcagagg

SEQ ID NO: 7426 - DNA, 23 bp, Homo sapiens
  source 1..23: mol_type = genomic DNA
tctgggggtgggtggggcagagg

SEQ ID NO: 7427 - DNA, 23 bp, Homo sapiens
  source 1..23: mol_type = genomic DNA
tctgggggtgggtggggcagtgg

SEQ ID NO: 7428 - DNA, 23 bp, Homo sapiens
  source 1..23: mol_type = genomic DNA
tctgggttttcttgtcccactgg

SEQ ID NO: 7429 - DNA, 23 bp, Homo sapiens
  source 1..23: mol_type = genomic DNA
tctgggttttcttgttccactgg

SEQ ID NO: 7430 - DNA, 23 bp, Homo sapiens
  source 1..23: mol_type = genomic DNA
tctggtcctgacctgagtggagg

SEQ ID NO: 7431 - DNA, 23 bp, Homo sapiens
  source 1..23: mol_type = genomic DNA
tctggttgtagtagccgcgcagg

SEQ ID NO: 7432 - DNA, 23 bp, Homo sapiens
  source 1..23: mol_type = genomic DNA
tctggttgtagtagcggagcagg

SEQ ID NO: 7433 - DNA, 23 bp, Homo sapiens
  source 1..23: mol_type = genomic DNA
tctggttgtagtagctgcgcagg

SEQ ID NO: 7434 - DNA, 23 bp, Homo sapiens
  source 1..23: mol_type = genomic DNA
tctgtcctgctccgccacacggg

SEQ ID NO: 7435 - DNA, 23 bp, Homo sapiens
  source 1..23: mol_type = genomic DNA
tctgtcctgctccgccgcacggg

SEQ ID NO: 7436 - DNA, 23 bp, Homo sapiens
  source 1..23: mol_type = genomic DNA
tcttcaagtcacaaagggaaggg

SEQ ID NO: 7437 - DNA, 23 bp, Homo sapiens
  source 1..23: mol_type = genomic DNA
tcttcccctccatttcctcaagg

SEQ ID NO: 7438 - DNA, 23 bp, Homo sapiens
  source 1..23: mol_type = genomic DNA
tcttcccctccatttcctcaggg

SEQ ID NO: 7439 - DNA, 23 bp, Homo sapiens
  source 1..23: mol_type = genomic DNA
tcttcctgacagacccccccagg

SEQ ID NO: 7440 - DNA, 23 bp, Homo sapiens
  source 1..23: mol_type = genomic DNA
tcttctctctagacaattaaggg

SEQ ID NO: 7441 - DNA, 23 bp, Homo sapiens
  source 1..23: mol_type = genomic DNA
tcttctctctaggacaattaagg

SEQ ID NO: 7442 - DNA, 23 bp, Homo sapiens
  source 1..23: mol_type = genomic DNA
tcttgaagatctgtgtgttccgg

SEQ ID NO: 7443 - DNA, 23 bp, Homo sapiens
  source 1..23: mol_type = genomic DNA
tcttgcagatctgtgtgttccgg

SEQ ID NO: 7444 - DNA, 23 bp, Homo sapiens
  source 1..23: mol_type = genomic DNA
tcttggagatctgtgtctcccgg

SEQ ID NO: 7445 - DNA, 23 bp, Homo sapiens
  source 1..23: mol_type = genomic DNA
tcttggagatctgtgtgttccgg

SEQ ID NO: 7446 - DNA, 23 bp, Homo sapiens
  source 1..23: mol_type = genomic DNA
tcttggggtctagagtgggcggg

SEQ ID NO: 7447 - DNA, 23 bp, Homo sapiens
  source 1..23: mol_type = genomic DNA
tcttggggtctagagtgggtggg

SEQ ID NO: 7448 - DNA, 23 bp, Homo sapiens
  source 1..23: mol_type = genomic DNA
tcttgtagatctgtgtgttccgg

SEQ ID NO: 7449 - DNA, 23 bp, Homo sapiens
  source 1..23: mol_type = genomic DNA
tcttgtcccacatctcctgcggg

SEQ ID NO: 7450 - DNA, 23 bp, Homo sapiens
  source 1..23: mol_type = genomic DNA
tcttgtcccacatctcctgtggg

SEQ ID NO: 7451 - DNA, 23 bp, Homo sapiens
  source 1..23: mol_type = genomic DNA
tctttcctgttccagagaggtgg

SEQ ID NO: 7452 - DNA, 23 bp, Homo sapiens
  source 1..23: mol_type = genomic DNA
tctttcctgttgcagagaggtgg

SEQ ID NO: 7453 - DNA, 23 bp, Homo sapiens
  source 1..23: mol_type = genomic DNA
tgaaaccggctaaaggcgcctgg

SEQ ID NO: 7454 - DNA, 23 bp, Homo sapiens
  source 1..23: mol_type = genomic DNA
tgaaaccgggtaaacgcgcctgg

SEQ ID NO: 7455 - DNA, 23 bp, Homo sapiens
  source 1..23: mol_type = genomic DNA
tgaaaccgggtaaaggcgactgg

SEQ ID NO: 7456 - DNA, 23 bp, Homo sapiens
  source 1..23: mol_type = genomic DNA
tgaaaccgggtaaaggcgcctgg

SEQ ID NO: 7457 - DNA, 23 bp, Homo sapiens
  source 1..23: mol_type = genomic DNA
tgaaaccgggtaaaggtgactgg

SEQ ID NO: 7458 - DNA, 23 bp, Homo sapiens
  source 1..23: mol_type = genomic DNA
tgaaaccgggttaaggcgcctgg

SEQ ID NO: 7459 - DNA, 23 bp, Homo sapiens
  source 1..23: mol_type = genomic DNA
tgaaagaggacctgcgctcttgg

SEQ ID NO: 7460 - DNA, 23 bp, Homo sapiens
  source 1..23: mol_type = genomic DNA
tgaacgaggacctgagctcctgg

SEQ ID NO: 7461 - DNA, 23 bp, Homo sapiens
  source 1..23: mol_type = genomic DNA
tgaacgaggacctgcgctcctgg

SEQ ID NO: 7462 - DNA, 23 bp, Homo sapiens
  source 1..23: mol_type = genomic DNA
tgaacgaggacctgcgctcttgg

SEQ ID NO: 7463 - DNA, 23 bp, Homo sapiens
  source 1..23: mol_type = genomic DNA
tgaacgaggatctgcgctcctgg

SEQ ID NO: 7464 - DNA, 23 bp, Homo sapiens
  source 1..23: mol_type = genomic DNA
tgaagaaatacctcatggagtgg

SEQ ID NO: 7465 - DNA, 23 bp, Homo sapiens
  source 1..23: mol_type = genomic DNA
tgaagaaatacttcatggagtgg

SEQ ID NO: 7466 - DNA, 23 bp, Homo sapiens
  source 1..23: mol_type = genomic DNA
tgaagcacatgtgacaatgaagg

SEQ ID NO: 7467 - DNA, 23 bp, Homo sapiens
  source 1..23: mol_type = genomic DNA
tgaagccaccctgaggtgctggg

SEQ ID NO: 7468 - DNA, 23 bp, Homo sapiens
  source 1..23: mol_type = genomic DNA
tgaaggaccctacgtaggttggg

SEQ ID NO: 7469 - DNA, 23 bp, Homo sapiens
  source 1..23: mol_type = genomic DNA
tgaagtccctgaggaaatggagg

SEQ ID NO: 7470 - DNA, 23 bp, Homo sapiens
  source 1..23: mol_type = genomic DNA
tgaagtccttgaggaaatggagg

SEQ ID NO: 7471 - DNA, 23 bp, Homo sapiens
  source 1..23: mol_type = genomic DNA
tgaagtctctgaggaaatggagg

SEQ ID NO: 7472 - DNA, 23 bp, Homo sapiens
  source 1..23: mol_type = genomic DNA
tgaatgaggacctgcgctcctgg

SEQ ID NO: 7473 - DNA, 23 bp, Homo sapiens
  source 1..23: mol_type = genomic DNA
tgaccaacccgcggggattttgg

SEQ ID NO: 7474 - DNA, 23 bp, Homo sapiens
  source 1..23: mol_type = genomic DNA
tgaccacgggggcggggccaggg

SEQ ID NO: 7475 - DNA, 23 bp, Homo sapiens
  source 1..23: mol_type = genomic DNA
tgaccagcctgagaatggacagg

SEQ ID NO: 7476 - DNA, 23 bp, Homo sapiens
  source 1..23: mol_type = genomic DNA
tgaccagcctgagaatggacggg

SEQ ID NO: 7477 - DNA, 23 bp, Homo sapiens
  source 1..23: mol_type = genomic DNA
tgaccagcctgagaatgggcagg

SEQ ID NO: 7478 - DNA, 23 bp, Homo sapiens
  source 1..23: mol_type = genomic DNA
tgaccatcctgagaacggacagg

SEQ ID NO: 7479 - DNA, 23 bp, Homo sapiens
  source 1..23: mol_type = genomic DNA
tgaccatcctgagaatggacagg

SEQ ID NO: 7480 - DNA, 23 bp, Homo sapiens
  source 1..23: mol_type = genomic DNA
tgacccagctgaagggctccagg

SEQ ID NO: 7481 - DNA, 23 bp, Homo sapiens
  source 1..23: mol_type = genomic DNA
tgacccgcatctcggcctctggg

SEQ ID NO: 7482 - DNA, 23 bp, Homo sapiens
  source 1..23: mol_type = genomic DNA
tgacccgcatctcggcgtctggg

SEQ ID NO: 7483 - DNA, 23 bp, Homo sapiens
  source 1..23: mol_type = genomic DNA
tgacccggctgaagggctccagg

SEQ ID NO: 7484 - DNA, 23 bp, Homo sapiens
  source 1..23: mol_type = genomic DNA
tgaccgcggggccggggccaggg

SEQ ID NO: 7485 - DNA, 23 bp, Homo sapiens
  source 1..23: mol_type = genomic DNA
tgaccgcggggcctgggccaggg

SEQ ID NO: 7486 - DNA, 23 bp, Homo sapiens
  source 1..23: mol_type = genomic DNA
tgaccgcgggggcggggccaggg

SEQ ID NO: 7487 - DNA, 23 bp, Homo sapiens
  source 1..23: mol_type = genomic DNA
tgacctcatggtcagagatgggg

SEQ ID NO: 7488 - DNA, 23 bp, Homo sapiens
  source 1..23: mol_type = genomic DNA
tgacctggctgaagggctccagg

SEQ ID NO: 7489 - DNA, 23 bp, Homo sapiens
  source 1..23: mol_type = genomic DNA
tgacggccatcctcggcgtctgg

SEQ ID NO: 7490 - DNA, 23 bp, Homo sapiens
  source 1..23: mol_type = genomic DNA
tgacggccatcctcggggtctgg

SEQ ID NO: 7491 - DNA, 23 bp, Homo sapiens
  source 1..23: mol_type = genomic DNA
tgacgtctctgaggaaatggagg

SEQ ID NO: 7492 - DNA, 23 bp, Homo sapiens
  source 1..23: mol_type = genomic DNA
tgacgtctctgaggaaatgtagg

SEQ ID NO: 7493 - DNA, 23 bp, Homo sapiens
  source 1..23: mol_type = genomic DNA
tgactatcctgagaatggacagg

SEQ ID NO: 7494 - DNA, 23 bp, Homo sapiens
  source 1..23: mol_type = genomic DNA
tgactggggacttcagaaccggg

SEQ ID NO: 7495 - DNA, 23 bp, Homo sapiens
  source 1..23: mol_type = genomic DNA
tgactggggactttagaaccggg

SEQ ID NO: 7496 - DNA, 23 bp, Homo sapiens
  source 1..23: mol_type = genomic DNA
tgactggttccctttgacaccgg

SEQ ID NO: 7497 - DNA, 23 bp, Homo sapiens
  source 1..23: mol_type = genomic DNA
tgagaaccccgcccgggacctgg

SEQ ID NO: 7498 - DNA, 23 bp, Homo sapiens
  source 1..23: mol_type = genomic DNA
tgagaacggacaggacacctggg

SEQ ID NO: 7499 - DNA, 23 bp, Homo sapiens
  source 1..23: mol_type = genomic DNA
tgagaatggacaggacacccggg

SEQ ID NO: 7500 - DNA, 23 bp, Homo sapiens
  source 1..23: mol_type = genomic DNA
tgagaatggacaggacacctggg

SEQ ID NO: 7501 - DNA, 23 bp, Homo sapiens
  source 1..23: mol_type = genomic DNA
tgagaatggacgggacacctggg

SEQ ID NO: 7502 - DNA, 23 bp, Homo sapiens
  source 1..23: mol_type = genomic DNA
tgagaatgggcaggacacctggg

SEQ ID NO: 7503 - DNA, 23 bp, Homo sapiens
  source 1..23: mol_type = genomic DNA
tgagagacacatcagagccctgg

SEQ ID NO: 7504 - DNA, 23 bp, Homo sapiens
  source 1..23: mol_type = genomic DNA
tgagagacatatcagagccctgg

SEQ ID NO: 7505 - DNA, 23 bp, Homo sapiens
  source 1..23: mol_type = genomic DNA
tgagagactcatcagagccctgg

SEQ ID NO: 7506 - DNA, 23 bp, Homo sapiens
  source 1..23: mol_type = genomic DNA
tgagagccccgcccgggacctgg

SEQ ID NO: 7507 - DNA, 23 bp, Homo sapiens
  source 1..23: mol_type = genomic DNA
tgagagccccgcccggggcctgg

SEQ ID NO: 7508 - DNA, 23 bp, Homo sapiens
  source 1..23: mol_type = genomic DNA
tgagagccccgtccgggacatgg

SEQ ID NO: 7509 - DNA, 23 bp, Homo sapiens
  source 1..23: mol_type = genomic DNA
tgagagccccgtccgggacctgg

SEQ ID NO: 7510 - DNA, 23 bp, Homo sapiens
  source 1..23: mol_type = genomic DNA
tgagataccagaaaggagccagg

SEQ ID NO: 7511 - DNA, 23 bp, Homo sapiens
  source 1..23: mol_type = genomic DNA
tgagataccagaaaggagtcagg

SEQ ID NO: 7512 - DNA, 23 bp, Homo sapiens
  source 1..23: mol_type = genomic DNA
tgagatccaccccgaggctgcgg

SEQ ID NO: 7513 - DNA, 23 bp, Homo sapiens
  source 1..23: mol_type = genomic DNA
tgagatcctccccgaggctgcgg

SEQ ID NO: 7514 - DNA, 23 bp, Homo sapiens
  source 1..23: mol_type = genomic DNA
tgagattctgggagctgaagtgg

SEQ ID NO: 7515 - DNA, 23 bp, Homo sapiens
  source 1..23: mol_type = genomic DNA
tgagatttcttgtctcactgagg

SEQ ID NO: 7516 - DNA, 23 bp, Homo sapiens
  source 1..23: mol_type = genomic DNA
tgagcatgaggcagagaacaagg

SEQ ID NO: 7517 - DNA, 23 bp, Homo sapiens
  source 1..23: mol_type = genomic DNA
tgagcgtcaggcagagaacaagg

SEQ ID NO: 7518 - DNA, 23 bp, Homo sapiens
  source 1..23: mol_type = genomic DNA
tgagcgtgaggcagagaacaagg

SEQ ID NO: 7519 - DNA, 23 bp, Homo sapiens
  source 1..23: mol_type = genomic DNA
tgagctaccagaaaggagccagg

SEQ ID NO: 7520 - DNA, 23 bp, Homo sapiens
  source 1..23: mol_type = genomic DNA
tgaggagccgcgccgggaggagg

SEQ ID NO: 7521 - DNA, 23 bp, Homo sapiens
  source 1..23: mol_type = genomic DNA
tgaggatggacaggacacctggg

SEQ ID NO: 7522 - DNA, 23 bp, Homo sapiens
  source 1..23: mol_type = genomic DNA
tgaggccaccctgaggtgctggg

SEQ ID NO: 7523 - DNA, 23 bp, Homo sapiens
  source 1..23: mol_type = genomic DNA
tgaggccactctgagatgctggg

SEQ ID NO: 7524 - DNA, 23 bp, Homo sapiens
  source 1..23: mol_type = genomic DNA
tgaggccactctgaggtgctggg

SEQ ID NO: 7525 - DNA, 23 bp, Homo sapiens
  source 1..23: mol_type = genomic DNA
tgagggacacatcagagccctgg

SEQ ID NO: 7526 - DNA, 23 bp, Homo sapiens
  source 1..23: mol_type = genomic DNA
tgagggagaggaatcctcctggg

SEQ ID NO: 7527 - DNA, 23 bp, Homo sapiens
  source 1..23: mol_type = genomic DNA
tgagggcactgggaggaagcagg

SEQ ID NO: 7528 - DNA, 23 bp, Homo sapiens
  source 1..23: mol_type = genomic DNA
tgaggggacagggaggaggcagg

SEQ ID NO: 7529 - DNA, 23 bp, Homo sapiens
  source 1..23: mol_type = genomic DNA
tgaggggacagggaggagtcagg

SEQ ID NO: 7530 - DNA, 23 bp, Homo sapiens
  source 1..23: mol_type = genomic DNA
tgaggggactgggaggaagcagg

SEQ ID NO: 7531 - DNA, 23 bp, Homo sapiens
  source 1..23: mol_type = genomic DNA
tgaggggactgggaggaggcagg

SEQ ID NO: 7532 - DNA, 23 bp, Homo sapiens
  source 1..23: mol_type = genomic DNA
tgaggtcaccctgaggtgctggg

SEQ ID NO: 7533 - DNA, 23 bp, Homo sapiens
  source 1..23: mol_type = genomic DNA
tgagtcatatgcgtcctgggggg

SEQ ID NO: 7534 - DNA, 23 bp, Homo sapiens
  source 1..23: mol_type = genomic DNA
tgagtcatatgcgtcttgggggg

SEQ ID NO: 7535 - DNA, 23 bp, Homo sapiens
  source 1..23: mol_type = genomic DNA
tgagtcccggtgggtgcgtgcgg

SEQ ID NO: 7536 - DNA, 23 bp, Homo sapiens
  source 1..23: mol_type = genomic DNA
tgagtccgggtgggtgactgggg

SEQ ID NO: 7537 - DNA, 23 bp, Homo sapiens
  source 1..23: mol_type = genomic DNA
tgagtccgggtgggtgcgtgggg

SEQ ID NO: 7538 - DNA, 23 bp, Homo sapiens
  source 1..23: mol_type = genomic DNA
tgagtggttccctttgacaccgg

SEQ ID NO: 7539 - DNA, 23 bp, Homo sapiens
  source 1..23: mol_type = genomic DNA
tgagtgtgaagcagagaacaagg

SEQ ID NO: 7540 - DNA, 23 bp, Homo sapiens
  source 1..23: mol_type = genomic DNA
tgagtgtgaggcagagaacaagg

SEQ ID NO: 7541 - DNA, 23 bp, Homo sapiens
  source 1..23: mol_type = genomic DNA
tgagttttcttgtcccactgggg

SEQ ID NO: 7542 - DNA, 23 bp, Homo sapiens
  source 1..23: mol_type = genomic DNA
tgatcgcctatagatctcccggg

SEQ ID NO: 7543 - DNA, 23 bp, Homo sapiens
  source 1..23: mol_type = genomic DNA
tgatcgcctgtagatctcccggg

SEQ ID NO: 7544 - DNA, 23 bp, Homo sapiens
  source 1..23: mol_type = genomic DNA
tgatcgcctgtaggtctcccggg

SEQ ID NO: 7545 - DNA, 23 bp, Homo sapiens
  source 1..23: mol_type = genomic DNA
tgatgaagcggggctccccgcgg

SEQ ID NO: 7546 - DNA, 23 bp, Homo sapiens
  source 1..23: mol_type = genomic DNA
tgatggcagtgggcgtgtggagg

SEQ ID NO: 7547 - DNA, 23 bp, Homo sapiens
  source 1..23: mol_type = genomic DNA
tgatggcggcaggcgtgtggagg

SEQ ID NO: 7548 - DNA, 23 bp, Homo sapiens
  source 1..23: mol_type = genomic DNA
tgatggcggcgggcgtgtggagg

SEQ ID NO: 7549 - DNA, 23 bp, Homo sapiens
  source 1..23: mol_type = genomic DNA
tgatggcggtgggcgtgtggagg

SEQ ID NO: 7550 - DNA, 23 bp, Homo sapiens
  source 1..23: mol_type = genomic DNA
tgatggctgttgtgatgtgtagg

SEQ ID NO: 7551 - DNA, 23 bp, Homo sapiens
  source 1..23: mol_type = genomic DNA
tgatgggggcgggagtgtgaagg

SEQ ID NO: 7552 - DNA, 23 bp, Homo sapiens
  source 1..23: mol_type = genomic DNA
tgatgggggcgggagtgtggagg

SEQ ID NO: 7553 - DNA, 23 bp, Homo sapiens
  source 1..23: mol_type = genomic DNA
tgatgggggtgggagtgtggagg

SEQ ID NO: 7554 - DNA, 23 bp, Homo sapiens
  source 1..23: mol_type = genomic DNA
tgatgtatggctgccacgtgggg

SEQ ID NO: 7555 - DNA, 23 bp, Homo sapiens
  source 1..23: mol_type = genomic DNA
tgatgtatggctgcgacgtgggg

SEQ ID NO: 7556 - DNA, 23 bp, Homo sapiens
  source 1..23: mol_type = genomic DNA
tgatgtgtgttgggtgttggggg

SEQ ID NO: 7557 - DNA, 23 bp, Homo sapiens
  source 1..23: mol_type = genomic DNA
tgatgtttggctgcgacgtgggg

SEQ ID NO: 7558 - DNA, 23 bp, Homo sapiens
  source 1..23: mol_type = genomic DNA
tgcaacaggaaagatgattgggg

SEQ ID NO: 7559 - DNA, 23 bp, Homo sapiens
  source 1..23: mol_type = genomic DNA
tgcagacccagggcaggatcagg

SEQ ID NO: 7560 - DNA, 23 bp, Homo sapiens
  source 1..23: mol_type = genomic DNA
tgcagacccagggcgggatcagg

SEQ ID NO: 7561 - DNA, 23 bp, Homo sapiens
  source 1..23: mol_type = genomic DNA
tgcagcacatgtgacaatgaagg

SEQ ID NO: 7562 - DNA, 23 bp, Homo sapiens
  source 1..23: mol_type = genomic DNA
tgcagggaacacttctacctggg

SEQ ID NO: 7563 - DNA, 23 bp, Homo sapiens
  source 1..23: mol_type = genomic DNA
tgcatcccagtaatgaggcaggg

SEQ ID NO: 7564 - DNA, 23 bp, Homo sapiens
  source 1..23: mol_type = genomic DNA
tgccatgtccgccgcggtccagg

SEQ ID NO: 7565 - DNA, 23 bp, Homo sapiens
  source 1..23: mol_type = genomic DNA
tgccattctccattcaacggagg

SEQ ID NO: 7566 - DNA, 23 bp, Homo sapiens
  source 1..23: mol_type = genomic DNA
tgccattctccattcaagggagg

SEQ ID NO: 7567 - DNA, 23 bp, Homo sapiens
  source 1..23: mol_type = genomic DNA
tgcccgcccggcgagggcgcagg

SEQ ID NO: 7568 - DNA, 23 bp, Homo sapiens
  source 1..23: mol_type = genomic DNA
tgcccggccccgaccaacccggg

SEQ ID NO: 7569 - DNA, 23 bp, Homo sapiens
  source 1..23: mol_type = genomic DNA
tgccctatgaggggactgggagg

SEQ ID NO: 7570 - DNA, 23 bp, Homo sapiens
  source 1..23: mol_type = genomic DNA
tgccctgtgaggggacagggagg

SEQ ID NO: 7571 - DNA, 23 bp, Homo sapiens
  source 1..23: mol_type = genomic DNA
tgccctgtgaggggactgggagg

SEQ ID NO: 7572 - DNA, 23 bp, Homo sapiens
  source 1..23: mol_type = genomic DNA
tgccgccggtgtgtgtcaaaggg

SEQ ID NO: 7573 - DNA, 23 bp, Homo sapiens
  source 1..23: mol_type = genomic DNA
tgccgtcgtaagcgtcctgccgg

SEQ ID NO: 7574 - DNA, 23 bp, Homo sapiens
  source 1..23: mol_type = genomic DNA
tgccgtcgtaagcgtcctgctgg

SEQ ID NO: 7575 - DNA, 23 bp, Homo sapiens
  source 1..23: mol_type = genomic DNA
tgccgtcgtaggcgtcctgctgg

SEQ ID NO: 7576 - DNA, 23 bp, Homo sapiens
  source 1..23: mol_type = genomic DNA
tgccgtcgtaggcgtcctggtgg

SEQ ID NO: 7577 - DNA, 23 bp, Homo sapiens
  source 1..23: mol_type = genomic DNA
tgcctcacactcagtgtgtttgg

SEQ ID NO: 7578 - DNA, 23 bp, Homo sapiens
  source 1..23: mol_type = genomic DNA
tgcctgcatccgctggtgtctgg

SEQ ID NO: 7579 - DNA, 23 bp, Homo sapiens
  source 1..23: mol_type = genomic DNA
tgcctgtgtccaggctggtctgg

SEQ ID NO: 7580 - DNA, 23 bp, Homo sapiens
  source 1..23: mol_type = genomic DNA
tgcggagccactccacgcacagg

SEQ ID NO: 7581 - DNA, 23 bp, Homo sapiens
  source 1..23: mol_type = genomic DNA
tgcggagccactccacgcaccgg

SEQ ID NO: 7582 - DNA, 23 bp, Homo sapiens
  source 1..23: mol_type = genomic DNA
tgcggagcccgtccacgcaccgg

SEQ ID NO: 7583 - DNA, 23 bp, Homo sapiens
  source 1..23: mol_type = genomic DNA
tgcggagcgactccacgcacagg

SEQ ID NO: 7584 - DNA, 23 bp, Homo sapiens
  source 1..23: mol_type = genomic DNA
tgcggtcccctcgctcctcccgg

SEQ ID NO: 7585 - DNA, 23 bp, Homo sapiens
  source 1..23: mol_type = genomic DNA
tgcgtggggactttagaactggg

SEQ ID NO: 7586 - DNA, 23 bp, Homo sapiens
  source 1..23: mol_type = genomic DNA
tgcgtgtaagtgatggcagtggg

SEQ ID NO: 7587 - DNA, 23 bp, Homo sapiens
  source 1..23: mol_type = genomic DNA
tgcgtgtaagtgatggcggcagg

SEQ ID NO: 7588 - DNA, 23 bp, Homo sapiens
  source 1..23: mol_type = genomic DNA
tgcgtgtaagtgatggcggcggg

SEQ ID NO: 7589 - DNA, 23 bp, Homo sapiens
  source 1..23: mol_type = genomic DNA
tgcgtgtaagtgatggcggtggg

SEQ ID NO: 7590 - DNA, 23 bp, Homo sapiens
  source 1..23: mol_type = genomic DNA
tgcgtgtaagtgatgggggcggg

SEQ ID NO: 7591 - DNA, 23 bp, Homo sapiens
  source 1..23: mol_type = genomic DNA
tgcgtgtaagtgatgggggtggg

SEQ ID NO: 7592 - DNA, 23 bp, Homo sapiens
  source 1..23: mol_type = genomic DNA
tgcgtgtaagtggtgggggtggg

SEQ ID NO: 7593 - DNA, 23 bp, Homo sapiens
  source 1..23: mol_type = genomic DNA
tgctaaggacagaccttaggagg

SEQ ID NO: 7594 - DNA, 23 bp, Homo sapiens
  source 1..23: mol_type = genomic DNA
tgctccacccacggcgcccgcgg

SEQ ID NO: 7595 - DNA, 23 bp, Homo sapiens
  source 1..23: mol_type = genomic DNA
tgctccacccacggcgcccgggg

SEQ ID NO: 7596 - DNA, 23 bp, Homo sapiens
  source 1..23: mol_type = genomic DNA
tgctccacccacggctcccgcgg

SEQ ID NO: 7597 - DNA, 23 bp, Homo sapiens
  source 1..23: mol_type = genomic DNA
tgctctatccacggcgcccgcgg

SEQ ID NO: 7598 - DNA, 23 bp, Homo sapiens
  source 1..23: mol_type = genomic DNA
tgctctatccacggcgcccgggg

SEQ ID NO: 7599 - DNA, 23 bp, Homo sapiens
  source 1..23: mol_type = genomic DNA
tgctctatccacggtgcccgcgg

SEQ ID NO: 7600 - DNA, 23 bp, Homo sapiens
  source 1..23: mol_type = genomic DNA
tgctctatccatggcgcccaggg

SEQ ID NO: 7601 - DNA, 23 bp, Homo sapiens
  source 1..23: mol_type = genomic DNA
tgctctatccatggcgcccgcgg

SEQ ID NO: 7602 - DNA, 23 bp, Homo sapiens
  source 1..23: mol_type = genomic DNA
tgctctatccatggcgcccgggg

SEQ ID NO: 7603 - DNA, 23 bp, Homo sapiens
  source 1..23: mol_type = genomic DNA
tgctgccggtgtgtgtcaaaggg

SEQ ID NO: 7604 - DNA, 23 bp, Homo sapiens
  source 1..23: mol_type = genomic DNA
tgctgcctgtgtgtgtcaaaggg

SEQ ID NO: 7605 - DNA, 23 bp, Homo sapiens
  source 1..23: mol_type = genomic DNA
tgcttcacactcaatatgtgtgg

SEQ ID NO: 7606 - DNA, 23 bp, Homo sapiens
  source 1..23: mol_type = genomic DNA
tgcttcacactcaatgtgtgtgg

SEQ ID NO: 7607 - DNA, 23 bp, Homo sapiens
  source 1..23: mol_type = genomic DNA
tgcttcccaggaatgagacaggg

SEQ ID NO: 7608 - DNA, 23 bp, Homo sapiens
  source 1..23: mol_type = genomic DNA
tgcttcccagtaacgaggcaggg

SEQ ID NO: 7609 - DNA, 23 bp, Homo sapiens
  source 1..23: mol_type = genomic DNA
tgcttcccagtaatgagacaggg

SEQ ID NO: 7610 - DNA, 23 bp, Homo sapiens
  source 1..23: mol_type = genomic DNA
tgcttcccagtaatgaggcaggg

SEQ ID NO: 7611 - DNA, 23 bp, Homo sapiens
  source 1..23: mol_type = genomic DNA
tgcttcccagtaatgatgcaggg

SEQ ID NO: 7612 - DNA, 23 bp, Homo sapiens
  source 1..23: mol_type = genomic DNA
tggaaagttctagtctctgaggg

SEQ ID NO: 7613 - DNA, 23 bp, Homo sapiens
  source 1..23: mol_type = genomic DNA
tggaacaggaaagatgattgggg

SEQ ID NO: 7614 - DNA, 23 bp, Homo sapiens
  source 1..23: mol_type = genomic DNA
tggaaccttccagaagtgggcgg

SEQ ID NO: 7615 - DNA, 23 bp, Homo sapiens
  source 1..23: mol_type = genomic DNA
tggaaccttccagaagtgggtgg

SEQ ID NO: 7616 - DNA, 23 bp, Homo sapiens
  source 1..23: mol_type = genomic DNA
tggaagaagaagtgaaactcagg

SEQ ID NO: 7617 - DNA, 23 bp, Homo sapiens
  source 1..23: mol_type = genomic DNA
tggaagcaccatccacacatggg

SEQ ID NO: 7618 - DNA, 23 bp, Homo sapiens
  source 1..23: mol_type = genomic DNA
tggaagcaccatccacacctggg

SEQ ID NO: 7619 - DNA, 23 bp, Homo sapiens
  source 1..23: mol_type = genomic DNA
tggaagcaccatccacacgtggg

SEQ ID NO: 7620 - DNA, 23 bp, Homo sapiens
  source 1..23: mol_type = genomic DNA
tggaaggtcccatcccctgcagg

SEQ ID NO: 7621 - DNA, 23 bp, Homo sapiens
  source 1..23: mol_type = genomic DNA
tggaaggttccatcccctgcagg

SEQ ID NO: 7622 - DNA, 23 bp, Homo sapiens
  source 1..23: mol_type = genomic DNA
tggaaggttccatctcctgctgg

SEQ ID NO: 7623 - DNA, 23 bp, Homo sapiens
  source 1..23: mol_type = genomic DNA
tggaaggttctatctcctgctgg

SEQ ID NO: 7624 - DNA, 23 bp, Homo sapiens
  source 1..23: mol_type = genomic DNA
tggaaggttctgtctcctgctgg

SEQ ID NO: 7625 - DNA, 23 bp, Homo sapiens
  source 1..23: mol_type = genomic DNA
tggacaggacacccgggatgggg

SEQ ID NO: 7626 - DNA, 23 bp, Homo sapiens
  source 1..23: mol_type = genomic DNA
tggacaggacacctgggatgggg

SEQ ID NO: 7627 - DNA, 23 bp, Homo sapiens
  source 1..23: mol_type = genomic DNA
tggacaggacacctggggtaggg

SEQ ID NO: 7628 - DNA, 23 bp, Homo sapiens
  source 1..23: mol_type = genomic DNA
tggacaggacacctggggtgggg

SEQ ID NO: 7629 - DNA, 23 bp, Homo sapiens
  source 1..23: mol_type = genomic DNA
tggacaggacacctggtgtgggg

SEQ ID NO: 7630 - DNA, 23 bp, Homo sapiens
  source 1..23: mol_type = genomic DNA
tggaccaaccgccctcctgaagg

SEQ ID NO: 7631 - DNA, 23 bp, Homo sapiens
  source 1..23: mol_type = genomic DNA
tggaccggtgagtgcggggttgg

SEQ ID NO: 7632 - DNA, 23 bp, Homo sapiens
  source 1..23: mol_type = genomic DNA
tggacgacacccagttcgtgagg

SEQ ID NO: 7633 - DNA, 23 bp, Homo sapiens
  source 1..23: mol_type = genomic DNA
tggacgacacgcagttcgcgcgg

SEQ ID NO: 7634 - DNA, 23 bp, Homo sapiens
  source 1..23: mol_type = genomic DNA
tggacgacacgcagttcgtgagg

SEQ ID NO: 7635 - DNA, 23 bp, Homo sapiens
  source 1..23: mol_type = genomic DNA
tggacgacacgcagttcgtgcgg

SEQ ID NO: 7636 - DNA, 23 bp, Homo sapiens
  source 1..23: mol_type = genomic DNA
tggacgacacgctgttcgtgagg

SEQ ID NO: 7637 - DNA, 23 bp, Homo sapiens
  source 1..23: mol_type = genomic DNA
tggacggcacccagttcgtgagg

SEQ ID NO: 7638 - DNA, 23 bp, Homo sapiens
  source 1..23: mol_type = genomic DNA
tggacgggacacctggggtgggg

SEQ ID NO: 7639 - DNA, 23 bp, Homo sapiens
  source 1..23: mol_type = genomic DNA
tggacggtgggctgggaagatgg

SEQ ID NO: 7640 - DNA, 23 bp, Homo sapiens
  source 1..23: mol_type = genomic DNA
tggactacacgcagttcgtgcgg

SEQ ID NO: 7641 - DNA, 23 bp, Homo sapiens
  source 1..23: mol_type = genomic DNA
tggactgggaagacggctctggg

SEQ ID NO: 7642 - DNA, 23 bp, Homo sapiens
  source 1..23: mol_type = genomic DNA
tggactgggaagatggctctggg

SEQ ID NO: 7643 - DNA, 23 bp, Homo sapiens
  source 1..23: mol_type = genomic DNA
tggagaaatacctcatggagtgg

SEQ ID NO: 7644 - DNA, 23 bp, Homo sapiens
  source 1..23: mol_type = genomic DNA
tggagaaatacctcatggattgg

SEQ ID NO: 7645 - DNA, 23 bp, Homo sapiens
  source 1..23: mol_type = genomic DNA
tggagaaggggtgaaaggtgggg

SEQ ID NO: 7646 - DNA, 23 bp, Homo sapiens
  source 1..23: mol_type = genomic DNA
tggagaaggggtgaagggtgggg

SEQ ID NO: 7647 - DNA, 23 bp, Homo sapiens
  source 1..23: mol_type = genomic DNA
tggagacctttagcagggtcagg

SEQ ID NO: 7648 - DNA, 23 bp, Homo sapiens
  source 1..23: mol_type = genomic DNA
tggagcccttcagcagggtcagg

SEQ ID NO: 7649 - DNA, 23 bp, Homo sapiens
  source 1..23: mol_type = genomic DNA
tggagcccttcagccaggtcagg

SEQ ID NO: 7650 - DNA, 23 bp, Homo sapiens
  source 1..23: mol_type = genomic DNA
tggagcccttcagccgggtcagg

SEQ ID NO: 7651 - DNA, 23 bp, Homo sapiens
  source 1..23: mol_type = genomic DNA
tggagcccttcagctgggtcagg

SEQ ID NO: 7652 - DNA, 23 bp, Homo sapiens
  source 1..23: mol_type = genomic DNA
tggaggaagaagagctcaggtgg

SEQ ID NO: 7653 - DNA, 23 bp, Homo sapiens
  source 1..23: mol_type = genomic DNA
tggaggacctaatgtgtgttggg

SEQ ID NO: 7654 - DNA, 23 bp, Homo sapiens
  source 1..23: mol_type = genomic DNA
tggaggaggaacagctcaggtgg

SEQ ID NO: 7655 - DNA, 23 bp, Homo sapiens
  source 1..23: mol_type = genomic DNA
tggaggaggaagagctcaggtgg

SEQ ID NO: 7656 - DNA, 23 bp, Homo sapiens
  source 1..23: mol_type = genomic DNA
tggagggcacgtgcgtggacggg

SEQ ID NO: 7657 - DNA, 23 bp, Homo sapiens
  source 1..23: mol_type = genomic DNA
tggagggcacgtgcgtggagtgg

SEQ ID NO: 7658 - DNA, 23 bp, Homo sapiens
  source 1..23: mol_type = genomic DNA
tggagggccggtgcgtggacggg

SEQ ID NO: 7659 - DNA, 23 bp, Homo sapiens
  source 1..23: mol_type = genomic DNA
tggagggccggtgcgtggagtgg

SEQ ID NO: 7660 - DNA, 23 bp, Homo sapiens
  source 1..23: mol_type = genomic DNA
tggagggcctgatgtgtgttggg

SEQ ID NO: 7661 - DNA, 23 bp, Homo sapiens
  source 1..23: mol_type = genomic DNA
tggagggcctgtgcgtggagtgg

SEQ ID NO: 7662 - DNA, 23 bp, Homo sapiens
  source 1..23: mol_type = genomic DNA
tggagggcgagtgcgtggacggg

SEQ ID NO: 7663 - DNA, 23 bp, Homo sapiens
  source 1..23: mol_type = genomic DNA
tggagggcgagtgcgtggagtgg

SEQ ID NO: 7664 - DNA, 23 bp, Homo sapiens
  source 1..23: mol_type = genomic DNA
tggaggggaagacagtccctagg

SEQ ID NO: 7665 - DNA, 23 bp, Homo sapiens
  source 1..23: mol_type = genomic DNA
tggagtaaggagggggatgaggg

SEQ ID NO: 7666 - DNA, 23 bp, Homo sapiens
  source 1..23: mol_type = genomic DNA
tggagtgggagcctggggcaagg

SEQ ID NO: 7667 - DNA, 23 bp, Homo sapiens
  source 1..23: mol_type = genomic DNA
tggatggcacgtgcgtggagtgg

SEQ ID NO: 7668 - DNA, 23 bp, Homo sapiens
  source 1..23: mol_type = genomic DNA
tggatgtacggctgcgacctggg

SEQ ID NO: 7669 - DNA, 23 bp, Homo sapiens
  source 1..23: mol_type = genomic DNA
tggatgtatggctgcgacctggg

SEQ ID NO: 7670 - DNA, 23 bp, Homo sapiens
  source 1..23: mol_type = genomic DNA
tggatgtatggctgcgacgtggg

SEQ ID NO: 7671 - DNA, 23 bp, Homo sapiens
  source 1..23: mol_type = genomic DNA
tggatgtattgagcatgcaatgg

SEQ ID NO: 7672 - DNA, 23 bp, Homo sapiens
  source 1..23: mol_type = genomic DNA
tggatgtattgagcatgcgatgg

SEQ ID NO: 7673 - DNA, 23 bp, Homo sapiens
  source 1..23: mol_type = genomic DNA
tggatgtgtggctgcgacctggg

SEQ ID NO: 7674 - DNA, 23 bp, Homo sapiens
  source 1..23: mol_type = genomic DNA
tggatgtttggctgcgacctggg

SEQ ID NO: 7675 - DNA, 23 bp, Homo sapiens
  source 1..23: mol_type = genomic DNA
tggattgggaagatggctctggg

SEQ ID NO: 7676 - DNA, 23 bp, Homo sapiens
  source 1..23: mol_type = genomic DNA
tggcacacagggcccagactggg

SEQ ID NO: 7677 - DNA, 23 bp, Homo sapiens
  source 1..23: mol_type = genomic DNA
tggcacacagggcccaggctggg

SEQ ID NO: 7678 - DNA, 23 bp, Homo sapiens
  source 1..23: mol_type = genomic DNA
tggcacacagggtcccaggctgg

SEQ ID NO: 7679 - DNA, 23 bp, Homo sapiens
  source 1..23: mol_type = genomic DNA
tggcaggtctgggggtgggtggg

SEQ ID NO: 7680 - DNA, 23 bp, Homo sapiens
  source 1..23: mol_type = genomic DNA
tggccatcttgagaatggacagg

SEQ ID NO: 7681 - DNA, 23 bp, Homo sapiens
  source 1..23: mol_type = genomic DNA
tggccattttgaggatggacagg

SEQ ID NO: 7682 - DNA, 23 bp, Homo sapiens
  source 1..23: mol_type = genomic DNA
tggcccgtccgtaggggatgagg

SEQ ID NO: 7683 - DNA, 23 bp, Homo sapiens
  source 1..23: mol_type = genomic DNA
tggcccgtccgtgggggatgagg

SEQ ID NO: 7684 - DNA, 23 bp, Homo sapiens
  source 1..23: mol_type = genomic DNA
tggcctcatggtcagagacgggg

SEQ ID NO: 7685 - DNA, 23 bp, Homo sapiens
  source 1..23: mol_type = genomic DNA
tggcctcatggtcagagaggggg

SEQ ID NO: 7686 - DNA, 23 bp, Homo sapiens
  source 1..23: mol_type = genomic DNA
tggcctcatggtcagagatgggg

SEQ ID NO: 7687 - DNA, 23 bp, Homo sapiens
  source 1..23: mol_type = genomic DNA
tggcctccaacgagaagaagagg

SEQ ID NO: 7688 - DNA, 23 bp, Homo sapiens
  source 1..23: mol_type = genomic DNA
tggcctcccacgagaagaagagg

SEQ ID NO: 7689 - DNA, 23 bp, Homo sapiens
  source 1..23: mol_type = genomic DNA
tggcctcccacgagaagaggagg

SEQ ID NO: 7690 - DNA, 23 bp, Homo sapiens
  source 1..23: mol_type = genomic DNA
tggcctcccacgaggaggggagg

SEQ ID NO: 7691 - DNA, 23 bp, Homo sapiens
  source 1..23: mol_type = genomic DNA
tggcctggtctccacaagctcgg

SEQ ID NO: 7692 - DNA, 23 bp, Homo sapiens
  source 1..23: mol_type = genomic DNA
tggccttccacgaggaggggagg

SEQ ID NO: 7693 - DNA, 23 bp, Homo sapiens
  source 1..23: mol_type = genomic DNA
tggcgggggcgcaggaccggggg

SEQ ID NO: 7694 - DNA, 23 bp, Homo sapiens
  source 1..23: mol_type = genomic DNA
tggcgggtctcagcccctcctgg

SEQ ID NO: 7695 - DNA, 23 bp, Homo sapiens
  source 1..23: mol_type = genomic DNA
tggcgggtctggggcggggtggg

SEQ ID NO: 7696 - DNA, 23 bp, Homo sapiens
  source 1..23: mol_type = genomic DNA
tggcgggtctgggggtgggtggg

SEQ ID NO: 7697 - DNA, 23 bp, Homo sapiens
  source 1..23: mol_type = genomic DNA
tggctagaggaggaattgtgagg

SEQ ID NO: 7698 - DNA, 23 bp, Homo sapiens
  source 1..23: mol_type = genomic DNA
tggctagaggaggaattgtgggg

SEQ ID NO: 7699 - DNA, 23 bp, Homo sapiens
  source 1..23: mol_type = genomic DNA
tggctatcttgagaatggacagg

SEQ ID NO: 7700 - DNA, 23 bp, Homo sapiens
  source 1..23: mol_type = genomic DNA
tggctgttgtgatgtgtaggagg

SEQ ID NO: 7701 - DNA, 23 bp, Homo sapiens
  source 1..23: mol_type = genomic DNA
tggctgttgttatgtgtaggagg

SEQ ID NO: 7702 - DNA, 23 bp, Homo sapiens
  source 1..23: mol_type = genomic DNA
tgggaaaagaggagaaggtgagg

SEQ ID NO: 7703 - DNA, 23 bp, Homo sapiens
  source 1..23: mol_type = genomic DNA
tgggaaaagaggggaaggtgagg

SEQ ID NO: 7704 - DNA, 23 bp, Homo sapiens
  source 1..23: mol_type = genomic DNA
tgggaaaggaagggaagatgagg

SEQ ID NO: 7705 - DNA, 23 bp, Homo sapiens
  source 1..23: mol_type = genomic DNA
tgggaaaggaggagaaggtgagg

SEQ ID NO: 7706 - DNA, 23 bp, Homo sapiens
  source 1..23: mol_type = genomic DNA
tgggaaaggaggggaagacgagg

SEQ ID NO: 7707 - DNA, 23 bp, Homo sapiens
  source 1..23: mol_type = genomic DNA
tgggaaaggaggggaagatgagg

SEQ ID NO: 7708 - DNA, 23 bp, Homo sapiens
  source 1..23: mol_type = genomic DNA
tgggaaaggaggggaaggtgagg

SEQ ID NO: 7709 - DNA, 23 bp, Homo sapiens
  source 1..23: mol_type = genomic DNA
tgggaagaaaatgccctatgagg

SEQ ID NO: 7710 - DNA, 23 bp, Homo sapiens
  source 1..23: mol_type = genomic DNA
tgggaagaaaatgccctgtgagg

SEQ ID NO: 7711 - DNA, 23 bp, Homo sapiens
  source 1..23: mol_type = genomic DNA
tgggaagaaaatgtcctgtgagg

SEQ ID NO: 7712 - DNA, 23 bp, Homo sapiens
  source 1..23: mol_type = genomic DNA
tgggaagacggctctgggaaagg

SEQ ID NO: 7713 - DNA, 23 bp, Homo sapiens
  source 1..23: mol_type = genomic DNA
tgggaagagtcagaaaattcagg

SEQ ID NO: 7714 - DNA, 23 bp, Homo sapiens
  source 1..23: mol_type = genomic DNA
tgggaagatggccctgggaaagg

SEQ ID NO: 7715 - DNA, 23 bp, Homo sapiens
  source 1..23: mol_type = genomic DNA
tgggaagatggctctgggaaagg

SEQ ID NO: 7716 - DNA, 23 bp, Homo sapiens
  source 1..23: mol_type = genomic DNA
tgggaagcagcatccacacaggg

SEQ ID NO: 7717 - DNA, 23 bp, Homo sapiens
  source 1..23: mol_type = genomic DNA
tgggaagcagcatcctcacaggg

SEQ ID NO: 7718 - DNA, 23 bp, Homo sapiens
  source 1..23: mol_type = genomic DNA
tgggaagcagcatgcacacaggg

SEQ ID NO: 7719 - DNA, 23 bp, Homo sapiens
  source 1..23: mol_type = genomic DNA
tgggagaagaagtgaaactcagg

SEQ ID NO: 7720 - DNA, 23 bp, Homo sapiens
  source 1..23: mol_type = genomic DNA
tgggagcctggggcaaggagggg

SEQ ID NO: 7721 - DNA, 23 bp, Homo sapiens
  source 1..23: mol_type = genomic DNA
tgggagcctgggggagaggaggg

SEQ ID NO: 7722 - DNA, 23 bp, Homo sapiens
  source 1..23: mol_type = genomic DNA
tgggagcctgggggccaggaggg

SEQ ID NO: 7723 - DNA, 23 bp, Homo sapiens
  source 1..23: mol_type = genomic DNA
tgggagcctgggggcgaggaggg

SEQ ID NO: 7724 - DNA, 23 bp, Homo sapiens
  source 1..23: mol_type = genomic DNA
tgggagcctgggggtgaggaggg

SEQ ID NO: 7725 - DNA, 23 bp, Homo sapiens
  source 1..23: mol_type = genomic DNA
tgggagggaaacggcctctgcgg

SEQ ID NO: 7726 - DNA, 23 bp, Homo sapiens
  source 1..23: mol_type = genomic DNA
tgggagggaaacggcctctgggg

SEQ ID NO: 7727 - DNA, 23 bp, Homo sapiens
  source 1..23: mol_type = genomic DNA
tgggagggaagcggcctctgcgg

SEQ ID NO: 7728 - DNA, 23 bp, Homo sapiens
  source 1..23: mol_type = genomic DNA
tgggagggaatcggcctctgcgg

SEQ ID NO: 7729 - DNA, 23 bp, Homo sapiens
  source 1..23: mol_type = genomic DNA
tgggataatctcctattcattgg

SEQ ID NO: 7730 - DNA, 23 bp, Homo sapiens
  source 1..23: mol_type = genomic DNA
tgggataatctcctattccgtgg

SEQ ID NO: 7731 - DNA, 23 bp, Homo sapiens
  source 1..23: mol_type = genomic DNA
tgggataatctcctattctttgg

SEQ ID NO: 7732 - DNA, 23 bp, Homo sapiens
  source 1..23: mol_type = genomic DNA
tgggatgcagcatccacacaggg

SEQ ID NO: 7733 - DNA, 23 bp, Homo sapiens
  source 1..23: mol_type = genomic DNA
tgggatggcccacgtgtggatgg

SEQ ID NO: 7734 - DNA, 23 bp, Homo sapiens
  source 1..23: mol_type = genomic DNA
tgggatggcccaggtgtggatgg

SEQ ID NO: 7735 - DNA, 23 bp, Homo sapiens
  source 1..23: mol_type = genomic DNA
tgggatggcccatgtgtggatgg

SEQ ID NO: 7736 - DNA, 23 bp, Homo sapiens
  source 1..23: mol_type = genomic DNA
tgggcaggacacctggggtgggg

SEQ ID NO: 7737 - DNA, 23 bp, Homo sapiens
  source 1..23: mol_type = genomic DNA
tgggcaggtgagtgcggggtcgg

SEQ ID NO: 7738 - DNA, 23 bp, Homo sapiens
  source 1..23: mol_type = genomic DNA
tgggccacctggcccgtccgtgg

SEQ ID NO: 7739 - DNA, 23 bp, Homo sapiens
  source 1..23: mol_type = genomic DNA
tgggccctgggcttctaccctgg

SEQ ID NO: 7740 - DNA, 23 bp, Homo sapiens
  source 1..23: mol_type = genomic DNA
tgggccggtgagtgcgggatcgg

SEQ ID NO: 7741 - DNA, 23 bp, Homo sapiens
  source 1..23: mol_type = genomic DNA
tgggccggtgagtgcggggtcgg

SEQ ID NO: 7742 - DNA, 23 bp, Homo sapiens
  source 1..23: mol_type = genomic DNA
tgggccggtgagtgcggggttgg

SEQ ID NO: 7743 - DNA, 23 bp, Homo sapiens
  source 1..23: mol_type = genomic DNA
tgggccggtgagtgcgggtcggg

SEQ ID NO: 7744 - DNA, 23 bp, Homo sapiens
  source 1..23: mol_type = genomic DNA
tgggcctgtgagtgcgaggttgg

SEQ ID NO: 7745 - DNA, 23 bp, Homo sapiens
  source 1..23: mol_type = genomic DNA
tgggcctgtgagtgcggggttgg

SEQ ID NO: 7746 - DNA, 23 bp, Homo sapiens
  source 1..23: mol_type = genomic DNA
tgggcgacccggcccgtccgtgg

SEQ ID NO: 7747 - DNA, 23 bp, Homo sapiens
  source 1..23: mol_type = genomic DNA
tgggcgacccgggccgtccgtgg

SEQ ID NO: 7748 - DNA, 23 bp, Homo sapiens
  source 1..23: mol_type = genomic DNA
tgggcgacctggcccgtccgtgg

SEQ ID NO: 7749 - DNA, 23 bp, Homo sapiens
  source 1..23: mol_type = genomic DNA
tgggcggattccgcagcctcggg

SEQ ID NO: 7750 - DNA, 23 bp, Homo sapiens
  source 1..23: mol_type = genomic DNA
tgggcggggctcgggggactggg

SEQ ID NO: 7751 - DNA, 23 bp, Homo sapiens
  source 1..23: mol_type = genomic DNA
tgggcgggggggcggggaggggg

SEQ ID NO: 7752 - DNA, 23 bp, Homo sapiens
  source 1..23: mol_type = genomic DNA
tgggcggggggggcggggagggg

SEQ ID NO: 7753 - DNA, 23 bp, Homo sapiens
  source 1..23: mol_type = genomic DNA
tgggcgggggggggtggggtggg

SEQ ID NO: 7754 - DNA, 23 bp, Homo sapiens
  source 1..23: mol_type = genomic DNA
tgggcggggggggtggggtgggg

SEQ ID NO: 7755 - DNA, 23 bp, Homo sapiens
  source 1..23: mol_type = genomic DNA
tgggcgggtcccgcggcctcagg

SEQ ID NO: 7756 - DNA, 23 bp, Homo sapiens
  source 1..23: mol_type = genomic DNA
tgggcgggtcccgcggcctcggg

SEQ ID NO: 7757 - DNA, 23 bp, Homo sapiens
  source 1..23: mol_type = genomic DNA
tgggcgggtgagtgcggggtcgg

SEQ ID NO: 7758 - DNA, 23 bp, Homo sapiens
  source 1..23: mol_type = genomic DNA
tgggcgggttccgcagcctcggg

SEQ ID NO: 7759 - DNA, 23 bp, Homo sapiens
  source 1..23: mol_type = genomic DNA
tgggctgggaagacagctctggg

SEQ ID NO: 7760 - DNA, 23 bp, Homo sapiens
  source 1..23: mol_type = genomic DNA
tgggctgggaagacggctctggg

SEQ ID NO: 7761 - DNA, 23 bp, Homo sapiens
  source 1..23: mol_type = genomic DNA
tgggctgggaagatggccctggg

SEQ ID NO: 7762 - DNA, 23 bp, Homo sapiens
  source 1..23: mol_type = genomic DNA
tgggctgggaagatggctctggg

SEQ ID NO: 7763 - DNA, 23 bp, Homo sapiens
  source 1..23: mol_type = genomic DNA
tgggctggtgagtgcggggtcgg

SEQ ID NO: 7764 - DNA, 23 bp, Homo sapiens
  source 1..23: mol_type = genomic DNA
tggggagctgaagtggtcggggg

SEQ ID NO: 7765 - DNA, 23 bp, Homo sapiens
  source 1..23: mol_type = genomic DNA
tggggagctgaagtggtctgggg

SEQ ID NO: 7766 - DNA, 23 bp, Homo sapiens
  source 1..23: mol_type = genomic DNA
tggggcagagggaaaaggcctgg

SEQ ID NO: 7767 - DNA, 23 bp, Homo sapiens
  source 1..23: mol_type = genomic DNA
tggggcagaggggaaaggcctgg

SEQ ID NO: 7768 - DNA, 23 bp, Homo sapiens
  source 1..23: mol_type = genomic DNA
tggggcagtggggaaaggcctgg

SEQ ID NO: 7769 - DNA, 23 bp, Homo sapiens
  source 1..23: mol_type = genomic DNA
tggggcggggctcgcgggacggg

SEQ ID NO: 7770 - DNA, 23 bp, Homo sapiens
  source 1..23: mol_type = genomic DNA
tggggcggggctcgggggaccgg

SEQ ID NO: 7771 - DNA, 23 bp, Homo sapiens
  source 1..23: mol_type = genomic DNA
tggggcggggctcgggggacggg

SEQ ID NO: 7772 - DNA, 23 bp, Homo sapiens
  source 1..23: mol_type = genomic DNA
tggggcggggtggggcagagggg

SEQ ID NO: 7773 - DNA, 23 bp, Homo sapiens
  source 1..23: mol_type = genomic DNA
tggggcttgaaacccccagtggg

SEQ ID NO: 7774 - DNA, 23 bp, Homo sapiens
  source 1..23: mol_type = genomic DNA
tggggcttgaaactcccagtggg

SEQ ID NO: 7775 - DNA, 23 bp, Homo sapiens
  source 1..23: mol_type = genomic DNA
tgggggactgggctgaccgcggg

SEQ ID NO: 7776 - DNA, 23 bp, Homo sapiens
  source 1..23: mol_type = genomic DNA
tgggggtggcgggtctggggcgg

SEQ ID NO: 7777 - DNA, 23 bp, Homo sapiens
  source 1..23: mol_type = genomic DNA
tgggggtgggtggggcagagggg

SEQ ID NO: 7778 - DNA, 23 bp, Homo sapiens
  source 1..23: mol_type = genomic DNA
tgggggtgggtggggcagtgggg

SEQ ID NO: 7779 - DNA, 23 bp, Homo sapiens
  source 1..23: mol_type = genomic DNA
tgggggtgtcatgtctcttaggg

SEQ ID NO: 7780 - DNA, 23 bp, Homo sapiens
  source 1..23: mol_type = genomic DNA
tgggggtgtcatgtcttttacgg

SEQ ID NO: 7781 - DNA, 23 bp, Homo sapiens
  source 1..23: mol_type = genomic DNA
tgggggtgtcatgtcttttaggg

SEQ ID NO: 7782 - DNA, 23 bp, Homo sapiens
  source 1..23: mol_type = genomic DNA
tggggtaaggagggagacggggg

SEQ ID NO: 7783 - DNA, 23 bp, Homo sapiens
  source 1..23: mol_type = genomic DNA
tggggtaaggagggagatggggg

SEQ ID NO: 7784 - DNA, 23 bp, Homo sapiens
  source 1..23: mol_type = genomic DNA
tggggtaaggaggggaatggggg

SEQ ID NO: 7785 - DNA, 23 bp, Homo sapiens
  source 1..23: mol_type = genomic DNA
tggggtaaggagggggatgaggg

SEQ ID NO: 7786 - DNA, 23 bp, Homo sapiens
  source 1..23: mol_type = genomic DNA
tggggtctagagtgggcgggggg

SEQ ID NO: 7787 - DNA, 23 bp, Homo sapiens
  source 1..23: mol_type = genomic DNA
tggggtgaagggatgaagggtgg

SEQ ID NO: 7788 - DNA, 23 bp, Homo sapiens
  source 1..23: mol_type = genomic DNA
tggggtgaaggggtgaagggtgg

SEQ ID NO: 7789 - DNA, 23 bp, Homo sapiens
  source 1..23: mol_type = genomic DNA
tggggtggcaggtctgggggtgg

SEQ ID NO: 7790 - DNA, 23 bp, Homo sapiens
  source 1..23: mol_type = genomic DNA
tggggtggcgggtctgggggtgg

SEQ ID NO: 7791 - DNA, 23 bp, Homo sapiens
  source 1..23: mol_type = genomic DNA
tggggtggggagggggcagaggg

SEQ ID NO: 7792 - DNA, 23 bp, Homo sapiens
  source 1..23: mol_type = genomic DNA
tggggtggggcagagggaaaagg

SEQ ID NO: 7793 - DNA, 23 bp, Homo sapiens
  source 1..23: mol_type = genomic DNA
tgggtcacatgtgtctttggggg

SEQ ID NO: 7794 - DNA, 23 bp, Homo sapiens
  source 1..23: mol_type = genomic DNA
tgggtcacgtgtgtctttggggg

SEQ ID NO: 7795 - DNA, 23 bp, Homo sapiens
  source 1..23: mol_type = genomic DNA
tgggtcagggctgaggcttgggg

SEQ ID NO: 7796 - DNA, 23 bp, Homo sapiens
  source 1..23: mol_type = genomic DNA
tgggtcatatgtgtcttgggggg

SEQ ID NO: 7797 - DNA, 23 bp, Homo sapiens
  source 1..23: mol_type = genomic DNA
tgggtctgcagtcatagttctgg

SEQ ID NO: 7798 - DNA, 23 bp, Homo sapiens
  source 1..23: mol_type = genomic DNA
tgggtctgcagtcgtagttctgg

SEQ ID NO: 7799 - DNA, 23 bp, Homo sapiens
  source 1..23: mol_type = genomic DNA
tgggtctgtagtcatacttctgg

SEQ ID NO: 7800 - DNA, 23 bp, Homo sapiens
  source 1..23: mol_type = genomic DNA
tgggtgacctggcccgtccgtgg

SEQ ID NO: 7801 - DNA, 23 bp, Homo sapiens
  source 1..23: mol_type = genomic DNA
tgggtgggggtggcgggtctggg

SEQ ID NO: 7802 - DNA, 23 bp, Homo sapiens
  source 1..23: mol_type = genomic DNA
tgggtggggtggcaggtctgggg

SEQ ID NO: 7803 - DNA, 23 bp, Homo sapiens
  source 1..23: mol_type = genomic DNA
tgggtggggtggcgggtctgggg

SEQ ID NO: 7804 - DNA, 23 bp, Homo sapiens
  source 1..23: mol_type = genomic DNA
tgggttttcttgtcccactgggg

SEQ ID NO: 7805 - DNA, 23 bp, Homo sapiens
  source 1..23: mol_type = genomic DNA
tggtacaggatctggaacccagg

SEQ ID NO: 7806 - DNA, 23 bp, Homo sapiens
  source 1..23: mol_type = genomic DNA
tggtcacatgggtggtcctaggg

SEQ ID NO: 7807 - DNA, 23 bp, Homo sapiens
  source 1..23: mol_type = genomic DNA
tggtcaccgctatgatgtgtagg

SEQ ID NO: 7808 - DNA, 23 bp, Homo sapiens
  source 1..23: mol_type = genomic DNA
tggtcgctactgtgatgtgtagg

SEQ ID NO: 7809 - DNA, 23 bp, Homo sapiens
  source 1..23: mol_type = genomic DNA
tggtcgctgccgtgatgtggagg

SEQ ID NO: 7810 - DNA, 23 bp, Homo sapiens
  source 1..23: mol_type = genomic DNA
tggtcgctgctgtgaggtggagg

SEQ ID NO: 7811 - DNA, 23 bp, Homo sapiens
  source 1..23: mol_type = genomic DNA
tggtcgctgctgtgatacatagg

SEQ ID NO: 7812 - DNA, 23 bp, Homo sapiens
  source 1..23: mol_type = genomic DNA
tggtcgctgctgtgatgtggagg

SEQ ID NO: 7813 - DNA, 23 bp, Homo sapiens
  source 1..23: mol_type = genomic DNA
tggtcgctgctgtgatgtgtagg

SEQ ID NO: 7814 - DNA, 23 bp, Homo sapiens
  source 1..23: mol_type = genomic DNA
tggtcgctgctgtggtgtgtagg

SEQ ID NO: 7815 - DNA, 23 bp, Homo sapiens
  source 1..23: mol_type = genomic DNA
tggtcggggcggggcggggcggg

SEQ ID NO: 7816 - DNA, 23 bp, Homo sapiens
  source 1..23: mol_type = genomic DNA
tggtctggtctccacaagctcgg

SEQ ID NO: 7817 - DNA, 23 bp, Homo sapiens
  source 1..23: mol_type = genomic DNA
tggtgaaatacctcatggagtgg

SEQ ID NO: 7818 - DNA, 23 bp, Homo sapiens
  source 1..23: mol_type = genomic DNA
tggtgagtcatatgcgtcctggg

SEQ ID NO: 7819 - DNA, 23 bp, Homo sapiens
  source 1..23: mol_type = genomic DNA
tggtgagtcatatgcgtcttggg

SEQ ID NO: 7820 - DNA, 23 bp, Homo sapiens
  source 1..23: mol_type = genomic DNA
tggtgagtcatatgcgttttggg

SEQ ID NO: 7821 - DNA, 23 bp, Homo sapiens
  source 1..23: mol_type = genomic DNA
tggtgagtcatatgtgtcttggg

SEQ ID NO: 7822 - DNA, 23 bp, Homo sapiens
  source 1..23: mol_type = genomic DNA
tggtgagtgcggggtcggcaggg

SEQ ID NO: 7823 - DNA, 23 bp, Homo sapiens
  source 1..23: mol_type = genomic DNA
tggtgagtgcggggtcgggaggg

SEQ ID NO: 7824 - DNA, 23 bp, Homo sapiens
  source 1..23: mol_type = genomic DNA
tggtgcttccagtaacaaggcgg

SEQ ID NO: 7825 - DNA, 23 bp, Homo sapiens
  source 1..23: mol_type = genomic DNA
tggtgcttccagtaacgaggtgg

SEQ ID NO: 7826 - DNA, 23 bp, Homo sapiens
  source 1..23: mol_type = genomic DNA
tggtggacatcggggtggggtgg

SEQ ID NO: 7827 - DNA, 23 bp, Homo sapiens
  source 1..23: mol_type = genomic DNA
tggtggacatgggggtggggtgg

SEQ ID NO: 7828 - DNA, 23 bp, Homo sapiens
  source 1..23: mol_type = genomic DNA
tggtggctgttgtgatgtgtagg

SEQ ID NO: 7829 - DNA, 23 bp, Homo sapiens
  source 1..23: mol_type = genomic DNA
tggtggctgttgttatgtgtagg

SEQ ID NO: 7830 - DNA, 23 bp, Homo sapiens
  source 1..23: mol_type = genomic DNA
tggtgggggtgggagtgtggagg

SEQ ID NO: 7831 - DNA, 23 bp, Homo sapiens
  source 1..23: mol_type = genomic DNA
tggtgggtcacatgtgtctttgg

SEQ ID NO: 7832 - DNA, 23 bp, Homo sapiens
  source 1..23: mol_type = genomic DNA
tggtgggtcacgtgtgtctttgg

SEQ ID NO: 7833 - DNA, 23 bp, Homo sapiens
  source 1..23: mol_type = genomic DNA
tggtgggtcatatgtgtcttggg

SEQ ID NO: 7834 - DNA, 23 bp, Homo sapiens
  source 1..23: mol_type = genomic DNA
tggttcccaaggctgctgcaggg

SEQ ID NO: 7835 - DNA, 23 bp, Homo sapiens
  source 1..23: mol_type = genomic DNA
tggttccctttgacacacacagg

SEQ ID NO: 7836 - DNA, 23 bp, Homo sapiens
  source 1..23: mol_type = genomic DNA
tggttccctttgacacacaccgg

SEQ ID NO: 7837 - DNA, 23 bp, Homo sapiens
  source 1..23: mol_type = genomic DNA
tgtaaaggtgagagcctggaggg

SEQ ID NO: 7838 - DNA, 23 bp, Homo sapiens
  source 1..23: mol_type = genomic DNA
tgtaaaggtgagagcttggaggg

SEQ ID NO: 7839 - DNA, 23 bp, Homo sapiens
  source 1..23: mol_type = genomic DNA
tgtaccagagagtgactctgagg

SEQ ID NO: 7840 - DNA, 23 bp, Homo sapiens
  source 1..23: mol_type = genomic DNA
tgtagaaatacctcatggagtgg

SEQ ID NO: 7841 - DNA, 23 bp, Homo sapiens
  source 1..23: mol_type = genomic DNA
tgtagaaatacttcatggagtgg

SEQ ID NO: 7842 - DNA, 23 bp, Homo sapiens
  source 1..23: mol_type = genomic DNA
tgtcacaaaagagtaagtgctgg

SEQ ID NO: 7843 - DNA, 23 bp, Homo sapiens
  source 1..23: mol_type = genomic DNA
tgtcccggacggggctctcaggg

SEQ ID NO: 7844 - DNA, 23 bp, Homo sapiens
  source 1..23: mol_type = genomic DNA
tgtcccgtccattctcaggctgg

SEQ ID NO: 7845 - DNA, 23 bp, Homo sapiens
  source 1..23: mol_type = genomic DNA
tgtcctgcccattctcaggctgg

SEQ ID NO: 7846 - DNA, 23 bp, Homo sapiens
  source 1..23: mol_type = genomic DNA
tgtcctgtccatcctcaaaatgg

SEQ ID NO: 7847 - DNA, 23 bp, Homo sapiens
  source 1..23: mol_type = genomic DNA
tgtcctgtccattctcaagatgg

SEQ ID NO: 7848 - DNA, 23 bp, Homo sapiens
  source 1..23: mol_type = genomic DNA
tgtcctgtccattctcaggatgg

SEQ ID NO: 7849 - DNA, 23 bp, Homo sapiens
  source 1..23: mol_type = genomic DNA
tgtcctgtccattctcaggctgg

SEQ ID NO: 7850 - DNA, 23 bp, Homo sapiens
  source 1..23: mol_type = genomic DNA
tgtcctgtccgttctcaggatgg

SEQ ID NO: 7851 - DNA, 23 bp, Homo sapiens
  source 1..23: mol_type = genomic DNA
tgtcctgtgagataccagaaagg

SEQ ID NO: 7852 - DNA, 23 bp, Homo sapiens
  source 1..23: mol_type = genomic DNA
tgtcctgtgagctaccagaaagg

SEQ ID NO: 7853 - DNA, 23 bp, Homo sapiens
  source 1..23: mol_type = genomic DNA
tgtcctgtgagggcactgggagg

SEQ ID NO: 7854 - DNA, 23 bp, Homo sapiens
  source 1..23: mol_type = genomic DNA
tgtcctgtgaggggactgggagg

SEQ ID NO: 7855 - DNA, 23 bp, Homo sapiens
  source 1..23: mol_type = genomic DNA
tgtcgaaatacctcatggagtgg

SEQ ID NO: 7856 - DNA, 23 bp, Homo sapiens
  source 1..23: mol_type = genomic DNA
tgtcttggggggggtctgacggg

SEQ ID NO: 7857 - DNA, 23 bp, Homo sapiens
  source 1..23: mol_type = genomic DNA
tgtgaagcacatgacaacgaagg

SEQ ID NO: 7858 - DNA, 23 bp, Homo sapiens
  source 1..23: mol_type = genomic DNA
tgtgaagcacatgacaatgaagg

SEQ ID NO: 7859 - DNA, 23 bp, Homo sapiens
  source 1..23: mol_type = genomic DNA
tgtgaatgcagacccagggcagg

SEQ ID NO: 7860 - DNA, 23 bp, Homo sapiens
  source 1..23: mol_type = genomic DNA
tgtgacacatgtgacaatgaagg

SEQ ID NO: 7861 - DNA, 23 bp, Homo sapiens
  source 1..23: mol_type = genomic DNA
tgtgactgcagacccagggcagg

SEQ ID NO: 7862 - DNA, 23 bp, Homo sapiens
  source 1..23: mol_type = genomic DNA
tgtgactgcagacccagggcggg

SEQ ID NO: 7863 - DNA, 23 bp, Homo sapiens
  source 1..23: mol_type = genomic DNA
tgtgagacagctgccttgtgtgg

SEQ ID NO: 7864 - DNA, 23 bp, Homo sapiens
  source 1..23: mol_type = genomic DNA
tgtgagtccgggtgggtgactgg

SEQ ID NO: 7865 - DNA, 23 bp, Homo sapiens
  source 1..23: mol_type = genomic DNA
tgtgcagcacgaggggctgcagg

SEQ ID NO: 7866 - DNA, 23 bp, Homo sapiens
  source 1..23: mol_type = genomic DNA
tgtgcagcacgaggggctgccgg

SEQ ID NO: 7867 - DNA, 23 bp, Homo sapiens
  source 1..23: mol_type = genomic DNA
tgtgcccccttccccaccccagg

SEQ ID NO: 7868 - DNA, 23 bp, Homo sapiens
  source 1..23: mol_type = genomic DNA
tgtgcccccttccctaccccagg

SEQ ID NO: 7869 - DNA, 23 bp, Homo sapiens
  source 1..23: mol_type = genomic DNA
tgtgccgccttccccaccccagg

SEQ ID NO: 7870 - DNA, 23 bp, Homo sapiens
  source 1..23: mol_type = genomic DNA
tgtgctcccttccccatcccagg

SEQ ID NO: 7871 - DNA, 23 bp, Homo sapiens
  source 1..23: mol_type = genomic DNA
tgtgctctcttccccatcccagg

SEQ ID NO: 7872 - DNA, 23 bp, Homo sapiens
  source 1..23: mol_type = genomic DNA
tgtgctctcttccccatcccggg

SEQ ID NO: 7873 - DNA, 23 bp, Homo sapiens
  source 1..23: mol_type = genomic DNA
tgtggaaatacctcatggagtgg

SEQ ID NO: 7874 - DNA, 23 bp, Homo sapiens
  source 1..23: mol_type = genomic DNA
tgtggagaccaggcctgcagggg

SEQ ID NO: 7875 - DNA, 23 bp, Homo sapiens
  source 1..23: mol_type = genomic DNA
tgtggctagaggaggaattgtgg

SEQ ID NO: 7876 - DNA, 23 bp, Homo sapiens
  source 1..23: mol_type = genomic DNA
tgtgggacaagaggaattatggg

SEQ ID NO: 7877 - DNA, 23 bp, Homo sapiens
  source 1..23: mol_type = genomic DNA
tgtgggcatcattgctggcctgg

SEQ ID NO: 7878 - DNA, 23 bp, Homo sapiens
  source 1..23: mol_type = genomic DNA
tgtggtggtaccttctggaaagg

SEQ ID NO: 7879 - DNA, 23 bp, Homo sapiens
  source 1..23: mol_type = genomic DNA
tgtggtggtaccttctggagagg

SEQ ID NO: 7880 - DNA, 23 bp, Homo sapiens
  source 1..23: mol_type = genomic DNA
tgtggtggtgccttctggacagg

SEQ ID NO: 7881 - DNA, 23 bp, Homo sapiens
  source 1..23: mol_type = genomic DNA
tgtggtggtgccttctggagagg

SEQ ID NO: 7882 - DNA, 23 bp, Homo sapiens
  source 1..23: mol_type = genomic DNA
tgtgtcccggcccggccgcgggg

SEQ ID NO: 7883 - DNA, 23 bp, Homo sapiens
  source 1..23: mol_type = genomic DNA
tgtgtcttgggggggtctgacgg

SEQ ID NO: 7884 - DNA, 23 bp, Homo sapiens
  source 1..23: mol_type = genomic DNA
tgtgtctttgggcgttctgacgg

SEQ ID NO: 7885 - DNA, 23 bp, Homo sapiens
  source 1..23: mol_type = genomic DNA
tgtgtctttggggggtctgatgg

SEQ ID NO: 7886 - DNA, 23 bp, Homo sapiens
  source 1..23: mol_type = genomic DNA
tgtgtctttgggggttctgacgg

SEQ ID NO: 7887 - DNA, 23 bp, Homo sapiens
  source 1..23: mol_type = genomic DNA
tgtgtctttgggtgttctgacgg

SEQ ID NO: 7888 - DNA, 23 bp, Homo sapiens
  source 1..23: mol_type = genomic DNA
tgtgtctttgggtgttctgatgg

SEQ ID NO: 7889 - DNA, 23 bp, Homo sapiens
  source 1..23: mol_type = genomic DNA
tgtgtttcctgatcctgccctgg

SEQ ID NO: 7890 - DNA, 23 bp, Homo sapiens
  source 1..23: mol_type = genomic DNA
tgttcagcacgaggggctgccgg

SEQ ID NO: 7891 - DNA, 23 bp, Homo sapiens
  source 1..23: mol_type = genomic DNA
ttaaggccctgactcctttctgg

SEQ ID NO: 7892 - DNA, 23 bp, Homo sapiens
  source 1..23: mol_type = genomic DNA
ttaaggccctggctcctttctgg

SEQ ID NO: 7893 - DNA, 23 bp, Homo sapiens
  source 1..23: mol_type = genomic DNA
ttaagggataaaatctctgaagg

SEQ ID NO: 7894 - DNA, 23 bp, Homo sapiens
  source 1..23: mol_type = genomic DNA
ttaagggataaaatctctgacgg

SEQ ID NO: 7895 - DNA, 23 bp, Homo sapiens
  source 1..23: mol_type = genomic DNA
ttaattgtcctagagagaagagg

SEQ ID NO: 7896 - DNA, 23 bp, Homo sapiens
  source 1..23: mol_type = genomic DNA
ttaattgtcctagagagcagagg

SEQ ID NO: 7897 - DNA, 23 bp, Homo sapiens
  source 1..23: mol_type = genomic DNA
ttaattgtctagagagaagaggg

SEQ ID NO: 7898 - DNA, 23 bp, Homo sapiens
  source 1..23: mol_type = genomic DNA
ttaccccagctcagggtgagggg

SEQ ID NO: 7899 - DNA, 23 bp, Homo sapiens
  source 1..23: mol_type = genomic DNA
ttaccccatctcagggtgagggg

SEQ ID NO: 7900 - DNA, 23 bp, Homo sapiens
  source 1..23: mol_type = genomic DNA
ttactccatctcagggtgagggg

SEQ ID NO: 7901 - DNA, 23 bp, Homo sapiens
  source 1..23: mol_type = genomic DNA
ttactccatctcagggtgcaggg

SEQ ID NO: 7902 - DNA, 23 bp, Homo sapiens
  source 1..23: mol_type = genomic DNA
ttagaggaacctcctagtcttgg

SEQ ID NO: 7903 - DNA, 23 bp, Homo sapiens
  source 1..23: mol_type = genomic DNA
ttagaggaacctcctcgtcttgg

SEQ ID NO: 7904 - DNA, 23 bp, Homo sapiens
  source 1..23: mol_type = genomic DNA
ttaggggaacctcctagtcttgg

SEQ ID NO: 7905 - DNA, 23 bp, Homo sapiens
  source 1..23: mol_type = genomic DNA
ttcacactcaatatgtgtggggg

SEQ ID NO: 7906 - DNA, 23 bp, Homo sapiens
  source 1..23: mol_type = genomic DNA
ttcacactcaatgtgtgtggggg

SEQ ID NO: 7907 - DNA, 23 bp, Homo sapiens
  source 1..23: mol_type = genomic DNA
ttcacatccgtgtcccggcccgg

SEQ ID NO: 7908 - DNA, 23 bp, Homo sapiens
  source 1..23: mol_type = genomic DNA
ttcacatccgtgtcccggcctgg

SEQ ID NO: 7909 - DNA, 23 bp, Homo sapiens
  source 1..23: mol_type = genomic DNA
ttcagcccctcctcgcccccagg

SEQ ID NO: 7910 - DNA, 23 bp, Homo sapiens
  source 1..23: mol_type = genomic DNA
ttcaggagggcggttggtccagg

SEQ ID NO: 7911 - DNA, 23 bp, Homo sapiens
  source 1..23: mol_type = genomic DNA
ttcaggtagggaaggggtgaggg

SEQ ID NO: 7912 - DNA, 23 bp, Homo sapiens
  source 1..23: mol_type = genomic DNA
ttcatatccatcacagtgagggg

SEQ ID NO: 7913 - DNA, 23 bp, Homo sapiens
  source 1..23: mol_type = genomic DNA
ttcatatctgtcacagtgagggg

SEQ ID NO: 7914 - DNA, 23 bp, Homo sapiens
  source 1..23: mol_type = genomic DNA
ttcatggagtgggagcctggggg

SEQ ID NO: 7915 - DNA, 23 bp, Homo sapiens
  source 1..23: mol_type = genomic DNA
ttccagcattcatgagtcagggg

SEQ ID NO: 7916 - DNA, 23 bp, Homo sapiens
  source 1..23: mol_type = genomic DNA
ttccagcattcgtgagtcagggg

SEQ ID NO: 7917 - DNA, 23 bp, Homo sapiens
  source 1..23: mol_type = genomic DNA
ttcccacagatagaaaaggaggg

SEQ ID NO: 7918 - DNA, 23 bp, Homo sapiens
  source 1..23: mol_type = genomic DNA
ttcccacaggtggaaaaggaggg

SEQ ID NO: 7919 - DNA, 23 bp, Homo sapiens
  source 1..23: mol_type = genomic DNA
ttcccacagttagaaaaggaggg

SEQ ID NO: 7920 - DNA, 23 bp, Homo sapiens
  source 1..23: mol_type = genomic DNA
ttcccactcccattgggtattgg

SEQ ID NO: 7921 - DNA, 23 bp, Homo sapiens
  source 1..23: mol_type = genomic DNA
ttcccactcccattgggtgtcgg

SEQ ID NO: 7922 - DNA, 23 bp, Homo sapiens
  source 1..23: mol_type = genomic DNA
ttcccctgactcacgaatgctgg

SEQ ID NO: 7923 - DNA, 23 bp, Homo sapiens
  source 1..23: mol_type = genomic DNA
ttcccctgactcatgaatgctgg

SEQ ID NO: 7924 - DNA, 23 bp, Homo sapiens
  source 1..23: mol_type = genomic DNA
ttccctttgacacacaccggcgg

SEQ ID NO: 7925 - DNA, 23 bp, Homo sapiens
  source 1..23: mol_type = genomic DNA
ttcctcccagtcccctcacaggg

SEQ ID NO: 7926 - DNA, 23 bp, Homo sapiens
  source 1..23: mol_type = genomic DNA
ttcctctccctcaggaccagagg

SEQ ID NO: 7927 - DNA, 23 bp, Homo sapiens
  source 1..23: mol_type = genomic DNA
ttcctctccctcaggagcagagg

SEQ ID NO: 7928 - DNA, 23 bp, Homo sapiens
  source 1..23: mol_type = genomic DNA
ttccttttgggtccaagacgagg

SEQ ID NO: 7929 - DNA, 23 bp, Homo sapiens
  source 1..23: mol_type = genomic DNA
ttccttttgggtccaagactagg

SEQ ID NO: 7930 - DNA, 23 bp, Homo sapiens
  source 1..23: mol_type = genomic DNA
ttccttttggttccaagacgagg

SEQ ID NO: 7931 - DNA, 23 bp, Homo sapiens
  source 1..23: mol_type = genomic DNA
ttcggggcggatctcggacccgg

SEQ ID NO: 7932 - DNA, 23 bp, Homo sapiens
  source 1..23: mol_type = genomic DNA
ttcggggtggatctcggacccgg

SEQ ID NO: 7933 - DNA, 23 bp, Homo sapiens
  source 1..23: mol_type = genomic DNA
ttcgtatctgtcacagtgagggg

SEQ ID NO: 7934 - DNA, 23 bp, Homo sapiens
  source 1..23: mol_type = genomic DNA
ttctcacagatagaaaaggaggg

SEQ ID NO: 7935 - DNA, 23 bp, Homo sapiens
  source 1..23: mol_type = genomic DNA
ttctcactcccattgggtgtcgg

SEQ ID NO: 7936 - DNA, 23 bp, Homo sapiens
  source 1..23: mol_type = genomic DNA
ttctcagctgctccgccacacgg

SEQ ID NO: 7937 - DNA, 23 bp, Homo sapiens
  source 1..23: mol_type = genomic DNA
ttctccccagaccccgaggatgg

SEQ ID NO: 7938 - DNA, 23 bp, Homo sapiens
  source 1..23: mol_type = genomic DNA
ttctccccagacgccgaggatgg

SEQ ID NO: 7939 - DNA, 23 bp, Homo sapiens
  source 1..23: mol_type = genomic DNA
ttctcgtgggaggccatccccgg

SEQ ID NO: 7940 - DNA, 23 bp, Homo sapiens
  source 1..23: mol_type = genomic DNA
ttctcgttggaggccatccccgg

SEQ ID NO: 7941 - DNA, 23 bp, Homo sapiens
  source 1..23: mol_type = genomic DNA
ttctggagggtgtgagaccctgg

SEQ ID NO: 7942 - DNA, 23 bp, Homo sapiens
  source 1..23: mol_type = genomic DNA
ttctgggagctgaagtggtcggg

SEQ ID NO: 7943 - DNA, 23 bp, Homo sapiens
  source 1..23: mol_type = genomic DNA
ttctggggagctgaagtggtcgg

SEQ ID NO: 7944 - DNA, 23 bp, Homo sapiens
  source 1..23: mol_type = genomic DNA
ttctgtttttgtcctaccccagg

SEQ ID NO: 7945 - DNA, 23 bp, Homo sapiens
  source 1..23: mol_type = genomic DNA
ttctgtttttgttctaccccagg

SEQ ID NO: 7946 - DNA, 23 bp, Homo sapiens
  source 1..23: mol_type = genomic DNA
ttcttcaagtcacaaagggaagg

SEQ ID NO: 7947 - DNA, 23 bp, Homo sapiens
  source 1..23: mol_type = genomic DNA
ttcttctcccaacctatgtcggg

SEQ ID NO: 7948 - DNA, 23 bp, Homo sapiens
  source 1..23: mol_type = genomic DNA
ttcttctcccaacctgcgacggg

SEQ ID NO: 7949 - DNA, 23 bp, Homo sapiens
  source 1..23: mol_type = genomic DNA
ttcttctcccaacctgcgtcggg

SEQ ID NO: 7950 - DNA, 23 bp, Homo sapiens
  source 1..23: mol_type = genomic DNA
ttcttctcccaacctgtgtcggg

SEQ ID NO: 7951 - DNA, 23 bp, Homo sapiens
  source 1..23: mol_type = genomic DNA
ttcttctcccaacttgtgtcggg

SEQ ID NO: 7952 - DNA, 23 bp, Homo sapiens
  source 1..23: mol_type = genomic DNA
ttcttcttccaacctgcgtcggg

SEQ ID NO: 7953 - DNA, 23 bp, Homo sapiens
  source 1..23: mol_type = genomic DNA
ttcttggggtctagagtgggcgg

SEQ ID NO: 7954 - DNA, 23 bp, Homo sapiens
  source 1..23: mol_type = genomic DNA
ttcttggggtctagagtgggtgg

SEQ ID NO: 7955 - DNA, 23 bp, Homo sapiens
  source 1..23: mol_type = genomic DNA
ttgaaaaggtgagattcttgggg

SEQ ID NO: 7956 - DNA, 23 bp, Homo sapiens
  source 1..23: mol_type = genomic DNA
ttgacaccggcagcagccttggg

SEQ ID NO: 7957 - DNA, 23 bp, Homo sapiens
  source 1..23: mol_type = genomic DNA
ttgacccctgcagcagccttggg

SEQ ID NO: 7958 - DNA, 23 bp, Homo sapiens
  source 1..23: mol_type = genomic DNA
ttgagaatggacaggacacccgg

SEQ ID NO: 7959 - DNA, 23 bp, Homo sapiens
  source 1..23: mol_type = genomic DNA
ttgagaatggacaggacacctgg

SEQ ID NO: 7960 - DNA, 23 bp, Homo sapiens
  source 1..23: mol_type = genomic DNA
ttgaggatggacaggacacctgg

SEQ ID NO: 7961 - DNA, 23 bp, Homo sapiens
  source 1..23: mol_type = genomic DNA
ttgagtccgggtgggtgcgtggg

SEQ ID NO: 7962 - DNA, 23 bp, Homo sapiens
  source 1..23: mol_type = genomic DNA
ttgcctctcagtcccacacaagg

SEQ ID NO: 7963 - DNA, 23 bp, Homo sapiens
  source 1..23: mol_type = genomic DNA
ttgcgtgtaagtgatggcggcgg

SEQ ID NO: 7964 - DNA, 23 bp, Homo sapiens
  source 1..23: mol_type = genomic DNA
ttgctctatccacggcgcccggg

SEQ ID NO: 7965 - DNA, 23 bp, Homo sapiens
  source 1..23: mol_type = genomic DNA
ttggaaagttctagtctctgagg

SEQ ID NO: 7966 - DNA, 23 bp, Homo sapiens
  source 1..23: mol_type = genomic DNA
ttggaccgcggcggacatggcgg

SEQ ID NO: 7967 - DNA, 23 bp, Homo sapiens
  source 1..23: mol_type = genomic DNA
ttggaggacctaatgtgtgttgg

SEQ ID NO: 7968 - DNA, 23 bp, Homo sapiens
  source 1..23: mol_type = genomic DNA
ttggagggcctgatgtgtgttgg

SEQ ID NO: 7969 - DNA, 23 bp, Homo sapiens
  source 1..23: mol_type = genomic DNA
ttgggagaagtgaaactcagggg

SEQ ID NO: 7970 - DNA, 23 bp, Homo sapiens
  source 1..23: mol_type = genomic DNA
ttgggagggaaacggcctctggg

SEQ ID NO: 7971 - DNA, 23 bp, Homo sapiens
  source 1..23: mol_type = genomic DNA
ttgggggactgggctgaccgcgg

SEQ ID NO: 7972 - DNA, 23 bp, Homo sapiens
  source 1..23: mol_type = genomic DNA
ttggggtctagagtgggcggggg

SEQ ID NO: 7973 - DNA, 23 bp, Homo sapiens
  source 1..23: mol_type = genomic DNA
ttggggtctagagtgggtggggg

SEQ ID NO: 7974 - DNA, 23 bp, Homo sapiens
  source 1..23: mol_type = genomic DNA
ttgggtgttgggcagaacagtgg

SEQ ID NO: 7975 - DNA, 23 bp, Homo sapiens
  source 1..23: mol_type = genomic DNA
ttgggtgttgggcggaacagtgg

SEQ ID NO: 7976 - DNA, 23 bp, Homo sapiens
  source 1..23: mol_type = genomic DNA
ttgggtgttggggggaacagtgg

SEQ ID NO: 7977 - DNA, 23 bp, Homo sapiens
  source 1..23: mol_type = genomic DNA
ttgggtgttgggtggaacagtgg

SEQ ID NO: 7978 - DNA, 23 bp, Homo sapiens
  source 1..23: mol_type = genomic DNA
ttggtcggggcggggcggggcgg

SEQ ID NO: 7979 - DNA, 23 bp, Homo sapiens
  source 1..23: mol_type = genomic DNA
ttgtaaaggtgagagcctggagg

SEQ ID NO: 7980 - DNA, 23 bp, Homo sapiens
  source 1..23: mol_type = genomic DNA
ttgtaaaggtgagagcttggagg

SEQ ID NO: 7981 - DNA, 23 bp, Homo sapiens
  source 1..23: mol_type = genomic DNA
ttgtctcccctccttgtgggagg

SEQ ID NO: 7982 - DNA, 23 bp, Homo sapiens
  source 1..23: mol_type = genomic DNA
ttgtggagaccaggcctgcaggg

SEQ ID NO: 7983 - DNA, 23 bp, Homo sapiens
  source 1..23: mol_type = genomic DNA
ttgtggttgggagcccatggggg

SEQ ID NO: 7984 - DNA, 23 bp, Homo sapiens
  source 1..23: mol_type = genomic DNA
ttgtgtcgggtccttcttccagg

SEQ ID NO: 7985 - DNA, 23 bp, Homo sapiens
  source 1..23: mol_type = genomic DNA
ttgtgtttgggagcccatggggg

SEQ ID NO: 7986 - DNA, 23 bp, Homo sapiens
  source 1..23: mol_type = genomic DNA
ttgtgtttgggagcccgtggggg

SEQ ID NO: 7987 - DNA, 23 bp, Homo sapiens
  source 1..23: mol_type = genomic DNA
tttaggccaaaaatccccccagg

SEQ ID NO: 7988 - DNA, 23 bp, Homo sapiens
  source 1..23: mol_type = genomic DNA
tttaggccaaaaatccccccggg

SEQ ID NO: 7989 - DNA, 23 bp, Homo sapiens
  source 1..23: mol_type = genomic DNA
tttaggccaaaaattcccccggg

SEQ ID NO: 7990 - DNA, 23 bp, Homo sapiens
  source 1..23: mol_type = genomic DNA
tttcagcattcatgagtcagggg

SEQ ID NO: 7991 - DNA, 23 bp, Homo sapiens
  source 1..23: mol_type = genomic DNA
tttcctcccctcctcgtggaagg

SEQ ID NO: 7992 - DNA, 23 bp, Homo sapiens
  source 1..23: mol_type = genomic DNA
tttcctcccctcctcgtgggagg

SEQ ID NO: 7993 - DNA, 23 bp, Homo sapiens
  source 1..23: mol_type = genomic DNA
tttcctcctcttctcgtgggagg

SEQ ID NO: 7994 - DNA, 23 bp, Homo sapiens
  source 1..23: mol_type = genomic DNA
tttcctcttcttctcgtgggagg

SEQ ID NO: 7995 - DNA, 23 bp, Homo sapiens
  source 1..23: mol_type = genomic DNA
tttcctcttcttctcgttggagg

SEQ ID NO: 7996 - DNA, 23 bp, Homo sapiens
  source 1..23: mol_type = genomic DNA
tttcctgttccagagaggtgggg

SEQ ID NO: 7997 - DNA, 23 bp, Homo sapiens
  source 1..23: mol_type = genomic DNA
tttcctgttgcagagaggtgggg

SEQ ID NO: 7998 - DNA, 23 bp, Homo sapiens
  source 1..23: mol_type = genomic DNA
tttcttcccacagatagaaaagg

SEQ ID NO: 7999 - DNA, 23 bp, Homo sapiens
  source 1..23: mol_type = genomic DNA
tttcttcccacaggtggaaaagg

SEQ ID NO: 8000 - DNA, 23 bp, Homo sapiens
  source 1..23: mol_type = genomic DNA
tttcttcccacagttagaaaagg

SEQ ID NO: 8001 - DNA, 23 bp, Homo sapiens
  source 1..23: mol_type = genomic DNA
tttcttctcacagatagaaaagg

SEQ ID NO: 8002 - DNA, 23 bp, Homo sapiens
  source 1..23: mol_type = genomic DNA
tttgacaccggcagcagccttgg

SEQ ID NO: 8003 - DNA, 23 bp, Homo sapiens
  source 1..23: mol_type = genomic DNA
tttgaccactgcagcagctgtgg

SEQ ID NO: 8004 - DNA, 23 bp, Homo sapiens
  source 1..23: mol_type = genomic DNA
tttgaccactgcggcagctgtgg

SEQ ID NO: 8005 - DNA, 23 bp, Homo sapiens
  source 1..23: mol_type = genomic DNA
tttgaccactttgaccactgcgg

SEQ ID NO: 8006 - DNA, 23 bp, Homo sapiens
  source 1..23: mol_type = genomic DNA
tttgacccctgcagcagccttgg

SEQ ID NO: 8007 - DNA, 23 bp, Homo sapiens
  source 1..23: mol_type = genomic DNA
tttgagtccgggtgggtgcgtgg

SEQ ID NO: 8008 - DNA, 23 bp, Homo sapiens
  source 1..23: mol_type = genomic DNA
tttgcagaaagagatgccagagg

SEQ ID NO: 8009 - DNA, 23 bp, Homo sapiens
  source 1..23: mol_type = genomic DNA
tttgtagaaagagatgccagagg

SEQ ID NO: 8010 - DNA, 23 bp, Homo sapiens
  source 1..23: mol_type = genomic DNA
tttgtgacttcaagagcctctgg

SEQ ID NO: 8011 - DNA, 23 bp, Homo sapiens
  source 1..23: mol_type = genomic DNA
ttttcccgagtttcctctgaggg

SEQ ID NO: 8012 - DNA, 23 bp, Homo sapiens
  source 1..23: mol_type = genomic DNA
ttttcctgagtttcctctgaggg

SEQ ID NO: 8013 - DNA, 23 bp, Homo sapiens
  source 1..23: mol_type = genomic DNA
ttttcctgagtttcttctgaggg

SEQ ID NO: 8014 - DNA, 29 bp, Homo sapiens
  source 1..29: mol_type = genomic DNA
acaccatcaactgcgaccagttcagcagg

SEQ ID NO: 8015 - DNA, 24 bp, Homo sapiens
  source 1..24: mol_type = genomic DNA
acacactgcgaccagttcagcagg

SEQ ID NO: 8016 - DNA, 30 bp, Homo sapiens
  source 1..30: mol_type = genomic DNA
acaccatcaaactgcgaccagttcagcagg

SEQ ID NO: 8017 - DNA, 23 bp, Homo sapiens
  source 1..23: mol_type = genomic DNA
gctgaactggtcgcagttgatgg

1.-30. (canceled)

31. A method for preventing attack of a cell by natural killer (NK) cells, the method comprising
disrupting an HLA-A allele and an HLA-B allele of the cell by genome editing such that the cell is not attacked by NK cells, wherein the cell is an iPSC that can express an endogenous HLA-C protein.

32. The method of claim 31, wherein the HLA-C protein is a protein encoded by one kind of allele selected from the group consisting of an HLA-C*01:02 allele, an HLA-C*02:02 allele, an HLA-C*03:03 allele, an HLA-C*03:04 allele, an HLA-C*04:01 allele, an HLA-C*05:01 allele, an HLA-C*06:02 allele, an HLA-C*07:01 allele, an HLA-C*07:02 allele, an HLA-C*08:01 allele, an HLA-C*12:02 allele, and an HLA-C*16:01 allele.

33. The method of claim 31, wherein the genome editing is performed by introducing a sequence-specific DNA-cleaving enzyme into the iPSC.

34. The method of claim 33, wherein the sequence-specific DNA-cleaving enzyme is CRISPR-Cas and the genome editing is performed by introducing a gRNA and the CRISPR-Cas into the iPSC.

35. A method for producing a low-antigenic cell in which a rejection reaction is reduced in a case where the cell is allogeneically transplanted into a recipient, the method comprising:
(i) disrupting an HLA-A allele and an HLA-B allele of the cell by genome editing, wherein the cell is an iPSC that can express an endogenous HLA-C protein;
(ii) applying a HLA protein expression-inducing agent to the iPSC and inducing expression of an HLA protein; and
(iii) recovering the iPSC in which the HLA-A allele and the HLA-B allele are disrupted.

36. The method of claim 35, wherein the HLA-C protein is a protein encoded by one kind of allele selected from the group consisting of an HLA-C*01:02 allele, an HLA-C*02:02 allele, an HLA-C*03:03 allele, an HLA-C*03:04 allele, an HLA-C*04:01 allele, an HLA-C*05:01 allele, an HLA-C*06:02 allele, an HLA-C*07:01 allele, an HLA-C*07:02 allele, an HLA-C*08:01 allele, an HLA-C*12:02 allele, and an HLA-C*16:01 allele.

37. The method of claim 35, wherein the HLA protein expression-inducing agent is interferon (IFN)-γ, IFN-α, IFN-β, interleukin (IL)-4, granulocyte macrophage colony-stimulating factor (GM-CSF), transforming growth factor (TGF)-α, or TGF-β.

38. The method of claim 35, further comprising differentiating the iPSC in which HLA-A allele and an HLA-B allele are disrupted.

39. The method of claim 35, wherein the genome editing is performed by introducing a sequence-specific DNA-cleaving enzyme into the iPSC.

40. The method of claim 39, wherein the sequence-specific DNA-cleaving enzyme is CRISPR-Cas and the genome editing is performed by introducing a gRNA and the CRISPR-Cas into the iPSC.

41. An induced pluripotent stem cell in which an HLA-A allele and an HLA-B allele are disrupted and at least one kind of endogenous HLA-C protein can be expressed, wherein the HLA-C protein is a protein encoded by one kind of allele selected from the group consisting of an HLA-C*01:02 allele, an HLA-C*02:02 allele, an HLA-C*03:03 allele, an HLA-C*03:04 allele, an HLA-C*04:01 allele, an HLA-C*05:01 allele, an HLA-C*06:02 allele, an HLA-C*07:01 allele, an HLA-C*07:02 allele, an HLA-C*08:01 allele, an HLA-C*12:02 allele, and an HLA-C*16:01 allele.

42. The induced pluripotent stem cell of claim 41, wherein at least one allele of a class II major histocompatibility complex transactivator (CIITA) allele, a regulatory factor X5 (RFX5) allele, a regulatory factor X associated protein (RFXAP) allele, or a regulatory factor X associated ankyrin containing protein (RFXANK) allele is further disrupted or modified.

43. The induced pluripotent stem cell of claim 41, wherein the cell expresses at least one class I HLA protein selected from the group consisting of an HLA-C protein, and HLA-E protein and an HLA-G protein; and wherein the expression of the class I HLA protein is stimulated by an HLA protein expression-inducing agent chosen from interferon (IFN)-γ, INF-α, INF-β, interleukin (IL)-4, granulocyte macrophage colony-stimulating factor (GM-CSF), transforming growth factor (TGF)-α, and TGF-β.
